(19) United States
(12) Patent Application Publication
(10) Pub. No.: US 2026/0078391 A1
(43) Pub. Date: Mar. 19, 2026

(54) GENETICALLY ENHANCED MAIZE PLANTS

(71) Applicant: INARI AGRICULTURE TECHNOLOGY, INC., Cambridge, MA (US)

(72) Inventors: Hannes Bart Claeys, Ghent (BE); Richard Bailey Flavell, Malibu, CA (US); Yajie Niu, Lexington, MA (US); Michael Lee Nuccio, Salem, NH (US); Randall William Shultz, Davis, CA (US); Davide Sosso, Cambridge, MA (US); Maria Margarita D. Unson, Pawcatuck, CT (US); John Patrick Casey, Jr., Boston, MA (US); Barry Andrew Martin, Newport, RI (US)

(21) Appl. No.: 18/870,789

(22) PCT Filed: Jun. 15, 2022
(86) PCT No.: PCT/US2022/072963

§ 371 Date: Dec. 2, 2024

(51) Int. Cl. C12N 15/82; C12N 9/22; C12N 15/11

(52) U.S. Cl. CPC C12N 15/8213; C12N 9/226; C12N 15/11; C12N 15/8261; C12N 15/8262; C12N 15/8269; C12N 15/827; C12N 15/8273; C12N 15/8279; C12N 15/8286; C12N 2310/20; C12N 2800/80

(57) ABSTRACT

Plant breeding and engineering has relied primarily on Mendelian genetics or recombinant techniques. The disclosure relates to novel maize plants, seeds and compositions, as well as improvements to maize plant breeding and methods for creating modifications in maize plant genomes. A transcriptional enhancer element which can increase the expression of both exogenous and endogenous maize genes is disclosed.

### INCORPORATION OF SEQUENCE LISTINGS

[0001] The sequence listing contained in the file named “P13901WO00_ST25.txt”, which is 2,272,048 bytes in size, was created on May 28, 2022 and electronically filed herewith, is incorporated herein by reference in its entirety.

### FIELD

[0002] Aspects of this invention relate to maize plant breeding methods and compositions. Disclosed herein are novel plant cells, plants and seeds derived from such plant cells and having enhanced traits, and methods of making and using such plant cells and derived plants and seeds.

### BACKGROUND

[0003] Plant breeding and engineering has relied primarily on Mendelian genetics or recombinant techniques. More recent examples of methods for editing the genomes of plants have now been described in US Patent Application Publication 20190352655. PCT application WO2016007948 describes methods for introducing targeted modifications to the maize genome.

### SUMMARY

[0004] Disclosed herein are methods for providing novel maize plant cells or maize plant protoplasts, plant callus, tissues or parts, whole maize plants, and maize seeds having one or more altered genetic sequences. Among other features, the methods and compositions described herein enable the stacking of preferred alleles without introducing unwanted genetic or epigenetic variation in the modified plants or plant cells. The efficiency and reliability of these targeted modification methods are significantly improved relative to traditional plant breeding, and can be used not only to augment traditional breeding techniques but also as a substitute for them.

[0005] A modified Zea sp. cell comprising at least one targeted modification of a first gene and at least one targeted modification of a second gene, wherein the targeted modifications result in a change of expression in the first gene and a change of expression in the second gene, and wherein the changes of expression in the first and second genes are both associated with improvement, relative to a reference cell lacking the modifications, in an agronomically relevant trait selected from the group consisting of: abiotic stress, architecture, biotic stress, photosynthesis, and resource partitioning is provided. Zea sp. plants and plant parts including seeds which comprise the aforementioned plant cells are also provided.

[0006] Modified Zea sp. plants comprising a targeted modification in a first gene and a targeted modification in a second gene, wherein the first gene comprises a first DNA sequence that is at least 60%, 70%, 80%, 90%, 95%, 96%, 97%, 98%, 99%, or 100% identical to SEQ ID NO: 1031, 1033, 1035, 1037, 1039, 1041, 1043, or 1045, wherein the targeted modifications result in a change in expression of the first and second gene relative to a reference plant lacking the modifications, wherein the second gene comprises a second DNA sequence that is distinct from the first DNA sequence and is set forth in Table 22 or Table 23, and wherein the change in expression in the first gene are associated with an improvement in water use efficiency or in nitrogen use efficiency relative to the first reference plant lacking the modifications are provided. In certain embodiments, the change in expression of both the first and the second gene are associated with the improvement in water use efficiency or nitrogen use efficiency and wherein the change in expression is an increase in expression of both the first and the second gene relative to a reference plant lacking the modifications. In certain embodiments, the first and the second gene are associated with an improvement in water use efficiency, wherein the first gene comprises a DNA sequence that is at least 60%, 70%, 80%, 90%, 95%, 96%, 97%, 98%, 99%, or 100% identical to 1031, 1033, 1035, 1037, 1039, or 1041 and the second gene comprises a DNA sequence that is at least 60%, 70%, 80%, 90%, 95%, 96%, 97%, 98%, 99%, or 100% identical to SEQ ID NO: 439, 441, 443, 445, 447, 449, 451, 453, 455, 457, 459, 461, 463, 465, 467, 469, 471, 473, 475, 477, 597, or 1007. In certain embodiments, the first gene encodes a protein comprising an amino acid sequence that is at least 95%, 96%, 98%, 99%, or 100% identical to the amino acid sequence of SEQ ID NO: 1032, 1034, 1036, 1038, 1040, or 1042; and the second gene encodes a protein comprising an amino acid sequence that is at least 95%, 96%, 97%, 98%, 99%, or 100% identical to the amino acid sequence of SEQ ID NO: 438, 440, 442, 444, 446, 448, 450, 452, 454, 456, 458, 460, 462, 464, 466, 468, 470, 472, 474, 476, 478, 598, or 1008. In certain embodiments, the first and the second gene are associated with an improvement in nitrogen use efficiency, wherein the first gene comprises a DNA sequence that is at least 60%, 70%, 80%, 90%, 95%, 96%, 97%, 98%, 99%, or 100% identical to SEQ ID NO: 1043 or 1045 and the second gene comprises a DNA sequence that is at least 60%%, 70%, 80%, 90%, 95%, 96%, 97%, 98%, 99%, or 100% identical to SEQ ID NO: 451, 683, 685, 687, 689, 691, 693, 695, 1024, 1026, or 1028. In certain embodiments, the first gene encodes a protein comprising an amino acid sequence that is at least 95%, 96%, 97%, 98%, 99%, or 100% identical to the amino acid sequence of SEQ ID NO: 1044 or 1046; and/or (b) the second gene encodes a protein comprising an amino acid sequence that is at least 95%, 96%, 97%, 98% or 99% identical to the amino acid sequence of SEQ ID NO: 452, 684, 686, 688, 690, 692, 694, 696, 1025, 1027, or 1029. Modified Zea sp. plants comprising a targeted modification in a first gene and a targeted modification in a second gene, wherein the first gene comprises a first DNA sequence that is at least 60%, 70%, 80%, 90%, 95%, 96%, 97%, 98%, 99%, or 100% identical to SEQ ID NO: 597, 1007, 1031, 1033, 1035, 1037, 1039, or 1041, wherein the second gene comprises a second DNA sequence that is distinct from the first DNA sequence and at least 60%, 70%, 80%, 90%, 95%, 96%, 97%, 98%, 99%, or 100% identical to SEQ ID NO: 433, 435, 437, 439, 441, 443, 445, 447, 449, 451, 453, 455, 457, 459, 461, 463, 465, 467, 469, 471, 473, 475, 477, 479, 481, 483, 485, 487, 489, 491, 493, 597, 1007, 1031, 1033, 1035, 1037, 1039, or 1041, wherein the targeted modifications result in an increase in expression of the first and second gene relative to a reference plant lacking the modifications, and wherein the increase of expression in the first and second gene are associated with an improvement in one or more abiotic stress tolerance traits relative to the first reference plant lacking the modifications are provided. In certain embodiments, the first gene encodes a protein comprising an amino acid sequence that is at least 95%, 96%, 97%, 98% or 99% identical to the amino acid sequence of SEQ ID NO: 598, 1008, 1032, 1034, 1036, 1038, 1040, or 1042; and/or the second gene encodes a protein comprising an amino acid sequence that is at least 95%, 96%, 97%, 98% or 99% identical to the amino acid sequence of SEQ ID NO: 434, 436, 438, 440, 442, 444, 446, 448, 450, 452, 454, 456, 458, 460, 462, 464, 466, 468, 470, 472, 474, 476, 478, 480, 482, 484, 486, 488, 490, 492, 494, 598, 1008, 1032, 1034, 1036, 1038, 1040, or 1042. In certain embodiments, the improvement in an abiotic stress tolerance trait is an improvement in water use efficiency, and wherein the second gene comprises a DNA sequence that is at least 60%, 70%, 80%, 90%, 95%, 96%, 97%, 98%, 99%, or 100% identical to SEQ ID NOs: 439, 441, 443, 445, 447, 449, 451, 453, 455, 457, 459, 461, 463, 465, 467, 469, 471, 473, 475, 477, 597, 1007, 1031, 1033, 1035, 1037, 1039, or 1041. In certain embodiments, the improvement in an abiotic stress tolerance trait is an improvement in water use efficiency and (a) the first gene encodes a protein comprising an amino acid sequence that is at least 95%, 96%, 97%, 98%, 99%, or 100% identical to the amino acid sequence of SEQ ID NO: 598, 1008, 1032, 1034, 1036, 1038, 1040, or 1042; and/or (b) the second gene encodes a protein comprising an amino acid sequence that is at least 95%, 96%, 97%, 98%, 99%, or 100% identical to the amino acid sequence of SEQ ID NO: 440, 442, 444, 446, 448, 450, 452, 454, 456, 458, 460, 462, 464, 466, 468, 470, 472, 474, 476, 478, 598, 1008, 1032, 1034, 1036, 1038, 1040, or 1042. Modified Zea sp. plants comprising a targeted modification in a first gene and a targeted modification in a second gene, wherein the first gene comprises a first DNA sequence that is at least 60%, 70%, 80%, 90%, 95%, 96%, 97%, 98%, 99%, or 100% identical to SEQ ID NO: 451, 1043, or 1045, wherein the second gene comprises a second DNA sequence that is distinct from the first DNA sequence and that is at least 60%, 70%, 80%, 90%, 95%, 96%, 97%, 98%, 99%, or 100% identical to SEQ ID NO: 451, 683, 685, 687, 689, 691, 693, 695, 1024, 1026, 1028, 1043, or 1045, wherein the targeted modifications result in an increase in expression of the first and second gene relative to a reference Zea sp. plant lacking the modifications, and wherein the increase of expression in the first and second gene are associated with an improvement in nitrogen use efficiency relative to the first reference plant lacking the modification are provided. In certain embodiments, the first gene encodes a protein comprising an amino acid sequence that is at least 95%, 96%, 97%, 98%, 99%, or 100% identical to the amino acid sequence of SEQ ID NO: 452, 1044, or 1046; and/or the second gene encodes a protein comprising an amino acid sequence that is at least 95%, 96%, 97%, 98%, 99%, or 100% identical to the amino acid sequence of SEQ ID NO: 452, 684, 686, 688, 690, 692, 694, 696, 1025, 1027, 1029, 1044, or 1046. In certain embodiments, any of the aforementioned plants can be a hybrid plant or an inbred plant. Also provided are Zea sp. cells obtained from any of the aforementioned plants or comprising any of the aforementioned targeted modifications in the first or first and second genes. Tissue cultures of regenerable Zea sp. cells comprising the aforementioned Zea sp. cells are also provided. Also provided are Zea sp. plant parts obtained from the aforementioned plants or comprising any of the aforementioned targeted modifications in the first or first and second genes, wherein the part is optionally a seed, a hybrid seed, an F1 hybrid seed, an F1 hybrid seed exhibiting heterosis, or an inbred seed. Also provided are methods of Zea sp. plant seed productions comprising crossing any of the aforementioned Zea sp. plant with a second Zea sp. plant to produce Zea sp. plant seed and optionally harvesting the seed. In certain embodiments of the methods, the genotype of the Zea sp. plant and the genotype of the second Zea sp. plant are of different genotypes and the seed is hybrid seed. In certain embodiments of the methods, the Zea sp. plant or the second Zea sp. plant further comprise a transgene conferring a desired trait and the harvested seed comprise the transgene. Also provided are methods of Zea sp. plant seed production comprising selfing any of the aforementioned Zea sp. plants to produce Zea sp. plant seed and optionally harvesting the seed, wherein optionally the Zea sp. plant and the seed are inbred. Methods of producing a Zea sp. plant comprising an added desired trait comprising introducing a transgene conferring the desired trait into any of the aforementioned plants are provided. Biological samples comprising a polynucleotide comprising the targeted modification in the first gene and the targeted modification in the second gene of any of the aforementioned Zea sp. plants are provided, optionally wherein the sample comprises Zea sp. plant seed meal or Zea sp. silage. Methods of identifying a biological sample comprising a polynucleotide comprising a modified plant gene that comprise the step of detecting the presence a polynucleotide comprising the targeted modification in the first gene and the targeted modification in the second gene of any of the aforementioned Zea sp. plants in the biological sample are provided, optionally wherein the biological sample is obtained from a Zea sp. plant cell, plant, or plant part, and optionally wherein the plant part is a Zea sp. seed. Methods of producing Zea sp. plant material comprising growing any of the aforementioned plants are also provided, optionally wherein growing comprises at least one of sowing a seed which germinates and forms the plant, irrigating the seed or plant, and/or treating the plant or the seed with a biological agent, herbicide, insecticide, or fungicide are provided. In certain embodiments, the methods further comprise harvesting the seed from the plant. Methods of producing a treated Zea sp. seed comprising contacting any of the aforementioned seeds of with a composition comprising biological agent, insecticide, and/or fungicide are also provided. In certain embodiments, the aforementioned targeted modifications in the first and second gene of the Zea sp. plant cell, plant, or plant part are modifications which are non-naturally occurring in Zea sp. plant cells, plants, or plant parts.

[0007] In another aspect, the invention provides a method of changing expression of a sequence of interest in a genome (e.g., a gene set forth in Table 22 or 23), including integrating a sequence encoded by a polynucleotide, such as a double-stranded or single-stranded polynucleotides including DNA, RNA, or a combination of DNA and RNA, at the site of at least one double-strand break (DSB) in a genome, which can be the genome of a eukaryotic nucleus (e. g., the nuclear genome of a plant cell) or a genome of an organelle (e. g., a mitochondrion or a plastid in a plant cell). In certain embodiments, methods of effecting in a Zea sp. genome at least one targeted modification of a first gene and at least one targeted modification of a second gene, wherein the targeted modifications result in a change of expression in the first gene and a change of expression in the second gene, wherein: (i) the first and second genes are both selected: (a) from the group of genes consisting of the genes identified in Table 23 to be associated with an improved abiotic stress tolerance trait; or (b) from the group of genes consisting of the genes identified in Table 23 to be associated with an improved architecture trait; or (c) from the group of genes consisting of the genes identified in Table 23 to be associated with an improved biotic stress tolerance trait; or (d) from the group of genes consisting of the genes identified in Table 23 to be associated with an improved photosynthesis trait; or (e) from the group of genes consisting of the genes identified in Table 23 to be associated with an improved resource partitioning trait; and (ii) each targeted modification is achieved by integrating a predetermined sequence encoded by a polynucleotide donor molecule at a double-strand break (DSB) located upstream of, downstream of, or within the first or the second gene, and wherein the polynucleotide donor molecule is selected from the group consisting of a double-stranded DNA, a single-stranded DNA, a single-stranded DNA/RNA hybrid, and a double-stranded DNA/RNA hybrid. In embodiments, the DSB is introduced upstream of, downstream of, or within the sequence of interest, which is coding, non-coding, or a combination of coding and non-coding sequence. In embodiments, a sequence encoded by the polynucleotide (such as a double-stranded DNA, a single-stranded DNA, a single-stranded DNA/RNA hybrid, or a double-stranded DNA/RNA hybrid), when integrated into the site of the DSB in the genome, is then functionally or operably linked to the sequence of interest, e. g., linked in a manner that modifies the transcription or the translation of the sequence of interest or that modifies the stability of a transcript including that of the sequence of interest. Embodiments include those where two or more DSBs are introduced into a genome, and wherein a sequence encoded by a polynucleotide (such as a double-stranded DNA, a single-stranded DNA, a single-stranded DNA/RNA hybrid, or a double-stranded DNA/RNA hybrid) that is integrated into each DSB is the same or different for each of the DSBs. In embodiments, at least two DSBs are introduced into a genome by one or more nucleases in such a way that genomic sequence (coding, non-coding, or a combination of coding and non-coding sequence) is deleted between the DSBs (leaving a deletion with blunt ends, overhangs or a combination of a blunt end and an overhang), and a sequence encoded by a polynucleotide (such as a double-stranded DNA, a single-stranded DNA, a single-stranded DNA/RNA hybrid, or a double-stranded DNA/RNA hybrid) molecule is integrated between the DSBs (i. e., at the location of the deleted genomic sequence). The method is particularly useful for integrating into the site of a DSB a heterologous nucleotide sequence (e.g., a sequence set forth in Table 24) that provides a useful function or use. For example, the method is useful for integrating or introducing into the genome a heterologous sequence that stops or knocks out expression of a sequence of interest (such as a gene encoding a protein), or a heterologous sequence that is a unique identifier nucleotide sequence, or a heterologous sequence that is (or that encodes) a sequence recognizable by a specific binding agent or that binds to a specific molecule, or a heterologous sequence that stabilizes or destabilizes a transcript containing it. Embodiments include use of the method to integrate or introduce into a genome sequence of a promoter or promoter-like element (e. g., sequence of an auxin-binding or hormone-binding or transcription-factor-binding element, including the 36 bp enhancer of SEQ ID NO:1030, or sequence of or encoding an aptamer or riboswitch) that can increase expression of a gene of interest, or a sequence-specific binding or cleavage site sequence (e. g., sequence of or encoding an endonuclease cleavage site, a small RNA recognition site, a recombinase site, a splice site, or a transposon recognition site). In embodiments, the method is used to delete or otherwise modify to make non-functional an endogenous functional sequence, such as a hormone- or transcription-factor-binding element, or a small RNA or recombinase or transposon recognition site. In embodiments, additional molecules are used to effect a desired expression result or a desired genomic change. For example, the method is used to integrate heterologous recombinase recognition site sequences at two DSBs in a genome, and the appropriate recombinase molecule is employed to excise genomic sequence located between the recombinase recognition sites. In another example, the method is used to integrate a polynucleotide-encoded heterologous small RNA recognition site sequence at a DSB in a sequence of interest in a genome, wherein when the small RNA is present (e. g., expressed endogenously or transiently or transgenically), the small RNA binds to and cleaves the transcript of the sequence of interest that contains the integrated small RNA recognition site. In another example, the method is used to integrate in the genome of a maize plant or plant cell a polynucleotide-encoded promoter or promoter-like element that is responsive to a specific molecule (e. g., an auxin, a hormone, a drug, an herbicide, or a polypeptide), wherein a specific level of expression of the sequence of interest is obtained by providing the corresponding specific molecule to the plant or plant cell; in a non-limiting example, an auxin-binding element is integrated into the promoter region of a protein-coding sequence in the genome of a plant or plant cell, whereby the expression of the protein is upregulated when the corresponding auxin is exogenously provided to the plant or plant cell (e. g., by adding the auxin to the medium of the plant cell or by spraying the auxin onto the plant). Another aspect of the invention is a maize cell including in its genome a heterologous DNA sequence, wherein the heterologous sequence includes (a) nucleotide sequence of a polynucleotide integrated by the method at the site of a DSB in the genome, and (b) genomic nucleotide sequence adjacent to the site of the DSB; related aspects include a plant containing such a cell including in its genome a heterologous DNA sequence, progeny seed or plants (including hybrid progeny seed or plants) of the plant, and processed or commodity products derived from the plant or from progeny seed or plants. In another aspect, the invention provides a heterologous nucleotide sequence including (a) nucleotide sequence of a polynucleotide (such as a double-stranded DNA, a single-stranded DNA, a single-stranded DNA/RNA hybrid, or a double-stranded DNA/RNA hybrid) molecule integrated by the method at the site of a DSB in a genome, and (b) genomic nucleotide sequence adjacent to the site of the DSB; related aspects include larger polynucleotides such as a plasmid, vector, or chromosome including the heterologous nucleotide sequence, as well as a polymerase primer for amplification of the heterologous nucleotide sequence.

[0008] In another aspect, the disclosure provides a composition including a plant cell and a polynucleotide (such as a double-stranded DNA, a single-stranded DNA, a single-stranded DNA/RNA hybrid, or a double-stranded DNA/RNA hybrid) donor molecule that is capable of being integrated at (or having its sequence integrated at) a double-strand break in genomic sequence in the plant cell. In various embodiments, the plant cell is an isolated plant cell or plant protoplast, or is in a monocot plant or dicot plant, a zygotic or somatic embryo, seed, plant part, or plant tissue. In embodiments the plant cell is capable of division or differentiation. In embodiments the plant cell is haploid, diploid, or polyploid. In embodiments, the plant cell includes a double-strand break (DSB) in its genome, at which DSB site the polynucleotide donor molecule is integrated using methods disclosed herein. In embodiments, at least one DSB is induced in the plant cell's genome by including in the composition a DSB-inducing agent, for example, various endonucleases (e. g., RNA-guided nucleases such as a type II Cas nuclease, a Cas9, a type V Cas nuclease, a Cpf1 (Cas12a) nuclease, a CasY (Cas12d) nuclease, a CasX (Cas12e) nuclease, a C2c1 nuclease, a C2c3 nuclease, a Cas12f nuclease, a Cas12i nuclease, or a Cas12j nuclease) and guide RNAs that direct cleavage by an RNA-guided nuclease; the dsDNA molecule is integrated into the DSB thus induced using methods disclose herein. Specific embodiments include compositions including a plant cell, at least one dsDNA molecule, and at least one ribonucleoprotein complex containing both a site-specific nuclease (e. g., Cas9, a Cpf1 (Cas12a) nuclease, a CasY (Cas12d) nuclease, a CasX (Cas12e) nuclease, a C2c1 nuclease, a C2c3 nuclease, a Cas12f nuclease, a Cas12i nuclease, a Cas12j nuclease) and at least one guide RNA; in some of these embodiments, the composition contains no plasmid or other expression vector for providing the nuclease, the guide RNA, or the dsDNA. In embodiments of the composition, the polynucleotide donor molecule is double-stranded DNA or RNA or a combination of DNA and RNA, and is blunt-ended, or contains one or more terminal overhangs, or contains chemical modifications such as phosphorothioate bonds or a detectable label. In other embodiments, the polynucleotide donor molecule is a single-stranded polynucleotide composed of DNA or RNA or a combination of DNA or RNA, and can further be chemically modified or labelled. In various embodiments of the composition, the polynucleotide donor molecule includes a nucleotide sequence that provides a useful function when integrated into the site of the DSB. For example, in various non-limiting embodiments the polynucleotide donor molecule includes: sequence that is recognizable by a specific binding agent or that binds to a specific molecule or encodes an RNA molecule or an amino acid sequence that binds to a specific molecule, or sequence that is responsive to a specific change in the physical environment or encodes an RNA molecule or an amino acid sequence that is responsive to a specific change in the physical environment, or heterologous sequence, or sequence that serves to stop transcription or translation at the site of the DSB, or sequence having secondary structure (e. g., double-stranded stems or stem-loops) or than encodes a transcript having secondary structure (e. g., double-stranded RNA that is cleavable by a Dicer-type ribonuclease). In particular embodiments, the modifications to the Zea sp. cell or plant will affect the activity or expression of one or more genes or proteins listed in Table 23, and in some embodiments two or more of those genes or proteins. In related embodiments, the activity or expression of one or more genes or proteins listed in Table 23 will be altered by the introduction or creation of one or more of the regulatory sequences listed in Table 24.

[0009] In another aspect, the disclosure provides a reaction mixture including: (a) a Zea sp. plant cell having at least one double-strand break (DSB) at a locus in its genome; and (b) a polynucleotide (such as a double-stranded DNA, a single-stranded DNA, a single-stranded DNA/RNA hybrid, or a double-stranded DNA/RNA hybrid) donor molecule capable of being integrated at (or having its sequence integrated at) the DSB (preferably by non-homologous end-joining (NHEJ)), wherein the polynucleotide donor molecule has a length of between about 18 to about 300 base-pairs (or nucleotides, if single-stranded), or between about 30 to about 100 base-pairs (or nucleotides, if single-stranded); wherein the polynucleotide donor molecule includes a sequence which, if integrated at the DSB, forms a heterologous insertion (wherein the sequence of the polynucleotide molecule is heterologous with respect to the genomic sequence flanking the insertion site or DSB). In embodiments of the reaction mixture, the plant cell is an isolated plant cell or plant protoplast. In various embodiments, the plant cell is an isolated plant cell or plant protoplast, or is in a monocot plant or dicot plant, a zygotic or somatic embryo, seed, plant part, or plant tissue. In embodiments the plant cell is capable of division or differentiation. In embodiments the plant cell is haploid, diploid, or polyploid. In embodiments of the reaction mixture, the polynucleotide donor molecule includes a nucleotide sequence that provides a useful function or use when integrated into the site of the DSB. For example, in various non-limiting embodiments the polynucleotide donor molecule includes: sequence that is recognizable by a specific binding agent or that binds to a specific molecule or encodes an RNA molecule or an amino acid sequence that binds to a specific molecule, or sequence that is responsive to a specific change in the physical environment or encodes an RNA molecule or an amino acid sequence that is responsive to a specific change in the physical environment, or heterologous sequence, or sequence that serves to stop transcription or translation at the site of the DSB, or sequence having secondary structure (e. g., double-stranded stems or stem-loops) or than encodes a transcript having secondary structure (e. g., double-stranded RNA that is cleavable by a Dicer-type ribonuclease).

[0010] In another aspect, the disclosure provides a polynucleotide for disrupting gene expression, wherein the polynucleotide is double-stranded and includes at least 18 contiguous base-pairs and encoding at least one stop codon in each possible reading frame on each strand, or is single-stranded and includes at least 11 contiguous nucleotides; and wherein the polynucleotide encodes at least one stop codon in each possible reading frame on each strand. In embodiments, the polynucleotide is a double-stranded DNA (dsDNA) or a double-stranded DNA/RNA hybrid molecule including at least 18 contiguous base-pairs and encoding at least one stop codon in each possible reading frame on either strand. In embodiments, the polynucleotide is a single-stranded DNA or a single-stranded DNA/RNA hybrid molecule including at least 11 contiguous nucleotides and encoding at least one stop codon in each possible reading frame on the strand. Such a polynucleotide is especially useful in methods disclosed herein, wherein, when a sequence encoded by the polynucleotide is integrated or inserted into a genome at the site of a DSB in a sequence of interest (such as a protein-coding gene), the sequence of the heterologously inserted polynucleotide serves to stop translation of the transcript containing the sequence of interest and the heterologously inserted polynucleotide sequence. Embodiments of the polynucleotide include those wherein the polynucleotide includes one or more chemical modifications or labels, e. g., at least one phosphorothioate modification.

[0011] In another aspect, the disclosure provides a method of identifying the locus of at least one double-stranded break (DSB) in genomic DNA in a cell (such as a plant cell) including the genomic DNA, wherein the method includes the steps of: (a) contacting the genomic DNA having a DSB with a polynucleotide (such as a double-stranded DNA, a single-stranded DNA, a single-stranded DNA/RNA hybrid, or a double-stranded DNA/RNA hybrid) donor molecule, wherein the polynucleotide donor molecule is capable of being integrated (or having its sequence integrated) at the DSB (preferably by non-homologous end-joining (NHEJ)) and has a length of between about 18 to about 300 base-pairs (or nucleotides, if single-stranded), or between about 30 to about 100 base-pairs (or nucleotides, if single-stranded); wherein a sequence encoded by the polynucleotide donor molecule, if integrated at the DSB, forms a heterologous insertion; and (b) using at least part of the sequence of the polynucleotide molecule as a target for PCR primers to allow amplification of DNA in the locus of the DSB. In a related aspect, the disclosure provides a method of identifying the locus of double-stranded breaks (DSBs) in genomic DNA in a pool of cells (such as plant cells or plant protoplasts), wherein the pool of cells includes cells having genomic DNA with a sequence encoded by a polynucleotide donor molecule inserted at the locus of the double stranded breaks; wherein the polynucleotide donor molecule is capable of being integrated (or having its sequence integrated) at the DSB and has a length of between about 18 to about 300 base-pairs (or nucleotides, if single-stranded), or between about 30 to about 100 base-pairs (or nucleotides, if single-stranded); wherein a sequence encoded by the polynucleotide donor molecule, if integrated at the DSB, forms a heterologous insertion; and wherein the sequence of the polynucleotide donor molecule is used as a target for PCR primers to allow amplification of DNA in the region of the double-stranded breaks. In embodiments, the pool of cells is a population of plant cells or plant protoplasts, wherein at least some of the cells contain multiple or different DSBs in the genome, each of which can be introduced into the genome by a different guide RNA.

[0012] In another aspect, the disclosure provides a method of identifying the nucleotide sequence of a locus in the genome that is associated with a phenotype, the method including the steps of: (a) providing to a population of cells having the genome: (i) multiple different guide RNAs (gRNAs) to induce multiple different double strand breaks (DSBs) in the genome, wherein each DSB is produced by an RNA-guided nuclease guided to a locus on the genome by one of the gRNAs, and (ii) polynucleotide (such as double-stranded DNA, single-stranded DNA, single-stranded DNA/RNA hybrid, and double-stranded DNA/RNA hybrid) donor molecules having a defined nucleotide sequence, wherein the polynucleotide donor molecules are capable of being integrated (or having their sequence integrated) into the DSBs by non-homologous end-joining (NHEJ); whereby when at least a sequence encoded by some of the polynucleotide donor molecules are inserted into at least some of the DSBs, a genetically heterogeneous population of cells is produced; (b) selecting from the genetically heterogeneous population of cells a subset of cells that exhibit a phenotype of interest; (c) using a pool of PCR primers that bind to at least part of the nucleotide sequence of the polynucleotide donor molecules to amplify from the subset of cells DNA from the locus of a DSB into which one of the polynucleotide donor molecules has been inserted; and (d) sequencing the amplified DNA to identify the locus associated with the phenotype of interest. In embodiments of the method, the gRNA is provided as a polynucleotide, or as a ribonucleoprotein including the gRNA and the RNA-guided nuclease. Related aspects include the cells produced by the method and pluralities, arrays, and genetically heterogeneous populations of such cells, as well as the subset of cells in which the locus associated with the phenotype has been identified, and callus, seedlings, plantlets, and plants and their seeds, grown or regenerated from such cells.

[0013] In another aspect, the disclosure provides a method of modifying a plant cell by creating a plurality of targeted modifications in the genome of the plant cell, wherein the method comprises contacting the genome with one or more targeting agents, wherein the one or more agents comprise or encode predetermined peptide or nucleic acid sequences, wherein the predetermined peptide or nucleic acid sequences bind preferentially at or near predetermined target sites within the plant genome, and wherein the binding facilitates the generation of the plurality of targeted modifications within the genome; wherein the plurality of targeted modifications occurs without an intervening step of separately identifying an individual modification and without a step of separately selecting for the occurrence of an individual modification among the plurality of targeted modifications mediated by the targeting agents; and wherein the targeted modifications alter at least one trait of the plant cell, or at least one trait of a plant comprising the plant cell, or at least one trait of a plant grown from the plant cell, or result in a detectable phenotype in the modified plant cell; and wherein at least two of the targeted modifications are insertions of predetermined sequences encoded by one or more polynucleotide donor molecules, and wherein at least one of the polynucleotide donor molecules lacks homology to the genome sequences adjacent to the site of insertion. In a related embodiment, at least one of the polynucleotide donor molecules used in the method is a single stranded DNA molecule, a single stranded RNA molecule, a single stranded DNA-RNA hybrid molecule, or a duplex RNA-DNA molecule. In another related embodiment, wherein the modified plant cell of the method is a meristematic cell, embryonic cell, or germline cell. In yet another related embodiment, the methods described in this paragraph, when practiced repeatedly or on a pool of cells, result in an efficiency of at least 1%, e.g., at least 2%, 5%, 7%, 10%, 15%, 20%, 25%, 30%, 35% or more, wherein said efficiency is determined, e.g., by dividing the number of successfully targeted cells by the total number of cells targeted.

[0014] In another embodiment, the disclosure provides a method of modifying a plant cell by creating a plurality of targeted modifications in the genome of the plant cell, comprising: contacting the genome with one or more targeting agents, wherein the one or more agents comprise or encode predetermined peptide or nucleic acid sequences, wherein the predetermined peptide or nucleic acid sequences bind preferentially at or near predetermined target sites within the plant genome, and wherein the binding facilitates the generation of the plurality of targeted modifications within the genome; wherein the plurality of targeted modifications occurs without an intervening step of separately identifying an individual modification and without a step of separately selecting for the occurrence of an individual modification among the plurality of targeted modifications mediated by the targeting agents; and wherein the targeted modifications improve at least one trait of the plant cell, or at least one trait of a plant comprising the plant cell, or at least one trait of a plant grown from the plant cell, or result in a detectable phenotype in the modified plant cell; and wherein at least one of the targeted modifications is an insertion of a predetermined sequence encoded by one or more polynucleotide donor molecules, and wherein at least one of the polynucleotide donor molecules is a single stranded DNA molecule, a single stranded RNA molecule, a single stranded DNA-RNA hybrid molecule, or a duplex RNA-DNA molecule. In a related embodiment, at least one of the polynucleotide donor molecules used in the method lacks homology to the genome sequences adjacent to the site of insertion. In another related embodiment, the modified plant cell is a meristematic cell, embryonic cell, or germline cell. In yet another related embodiment, repetition of the methods described in this paragraph result in an efficiency of at least 1%, e.g., at least 2%, 5%, 7%, 10%, 15%, 20%, 25%, 30%, 35% or more, wherein said efficiency is determined by dividing the number of successfully targeted cells by the total number of cells targeted.

[0015] In another embodiment, the disclosure provides a method of modifying a plant cell by creating a plurality of targeted modifications in the genome of the plant cell, comprising: contacting the genome with one or more targeting agents, wherein the one or more agents comprise or encode predetermined peptide or nucleic acid sequences, wherein the predetermined peptide or nucleic acid sequences bind preferentially at or near predetermined target sites within the plant genome, and wherein the binding facilitates the generation of the plurality of targeted modifications within the genome; wherein the plurality of modifications occurs without an intervening step of separately identifying an individual modification and without a step of separately selecting for the occurrence of an individual modification among the plurality of targeted modifications mediated by the targeting agents; wherein the targeted modifications improve at least one trait of the plant cell, or at least one trait of a plant comprising the plant cell, or at least one trait of a plant or seed obtained from the plant cell, or result in a detectable phenotype in the modified plant cell; and wherein the modified plant cell is a meristematic cell, embryonic cell, or germline cell. In a related embodiment, at least one of the targeted modifications is an insertion of a predetermined sequence encoded by one or more polynucleotide donor molecules, and wherein at least one of the polynucleotide donor molecules is a single stranded DNA molecule, a single stranded RNA molecule, a single stranded DNA-RNA hybrid molecule, or a duplex RNA-DNA molecule. In yet another related embodiment, at least one of the polynucleotide donor molecules lacks homology to the genome sequences adjacent to the site of insertion. In yet another embodiment related to the methods of this paragraph, repetition of the method results in an efficiency of at least 1%, e.g., at least 2%, 5%, 7%, 10%, 15%, 20%, 25%, 30%, 35% or more, wherein said efficiency is determined by dividing the number of successfully targeted cells by the total number of cells targeted.

[0016] In another embodiment, the disclosure provides a method of modifying a Zea sp. plant cell by creating a plurality of targeted modifications in the genome of the plant cell, comprising: contacting the genome with one or more targeting agents, wherein the one or more agents comprise or encode predetermined peptide or nucleic acid sequences, wherein the predetermined peptide or nucleic acid sequences bind preferentially at or near predetermined target sites within the plant genome, and wherein the binding facilitates the generation of the plurality of targeted modifications within the genome; wherein the plurality of modifications occurs without an intervening step of separately identifying an individual modification and without a step of separately selecting for the occurrence of an individual modification among the plurality of targeted modifications mediated by the targeting agents; and wherein the targeted modifications improve at least one trait of the plant cell, or at least one trait of a plant comprising the plant cell, or at least one trait of a plant or seed obtained from the plant cell, or result in a detectable phenotype in the modified plant cell; and wherein repetition of the aforementioned steps results in an efficiency of at least 1%, e.g., at least 2%, 5%, 7%, 10%, 15%, 20%, 25%, 30%, 35% or more, wherein said efficiency is determined by dividing the number of successfully targeted cells by the total number of cells targeted. In a related embodiment, the modified plant cell is a meristematic cell, embryonic cell, or germline cell. In another related embodiment, at least one of the targeted modifications is an insertion of a predetermined sequence encoded by one or more polynucleotide donor molecules, and wherein at least one of the polynucleotide donor molecules is a single stranded DNA molecule, a single stranded RNA molecule, a single stranded DNA-RNA hybrid molecule, or a duplex RNA-DNA molecule. In yet another related embodiment of the methods of this paragraph, at least one of the polynucleotide donor molecules used in the method lacks homology to the genome sequences adjacent to the site of insertion.

[0017] In various embodiments of the methods described above, at least one of the targeted modifications is an insertion between 3 and 400 nucleotides in length, between 10 and 350 nucleotides in length, between 18 and 350 nucleotides in length, between 18 and 200 nucleotides in length, between 10 and 150 nucleotides in length, or between 11 and 100 nucleotides in length. In certain, embodiments, two of the targeted modifications are insertions between 10 and 350 nucleotides in length, between 18 and 350 nucleotides in length, between 18 and 200 nucleotides in length, between 10 and 150 nucleotides in length, or between 11 and 100 nucleotides in length.

[0018] In another variation of the methods described above, at least two insertions are made, and at least one of the insertions is an upregulatory sequence. In yet another variation, the targeted modification methods described above insert or create at least one transcription factor binding site. In yet another variation of the methods described above, the insertion or insertions of predetermined sequences into the plant genome are accompanied by the deletion of sequences from the plant genome.

[0019] In yet another embodiment of the targeted modification methods described above, the methods further comprise obtaining a plant from the modified plant cell and breeding the plant. In yet another embodiment, the methods described above comprise a step of introducing additional genetic or epigenetic changes into the modified plant cell or into a plant grown from the modified plant cell.

[0020] In an embodiment of the targeted modification methods described above, at least two targeted insertions are made and the targeted insertions independently up- or down-regulate the expression of two or more distinct genes. For example, a targeted insertion may increase expression at least 10%, 15%, 20%, 25%, 30%, 35%, 40%, 50%, 60%, 70%, 80%, 90%, 95%, 100% or greater, e.g., at least a 2-fold, 5-fold, 10-fold, 20-fold, 30-fold, 40-fold, 50-fold change, 100-fold or even 1000-fold change or more. In some embodiments, expression is increased between 10-100%; between 2-fold and 5-fold; between 2 and 10-fold; between 10-fold and 50-fold; between 10-fold and a 100-fold; between 100-fold and 1000-fold; between 1000-fold and 5,000-fold; between 5,000-fold and 10,000 fold. In some embodiments, a targeted insertion may decrease expression by at least 1%, 5%, 10%, 15%, 20%, 25%, 30%, 35%, 40%, 50%, 60%, 70%, 80%, 90%, 95%, 99% or more. Polynucleotides used in such targeted insertions that can provide for such increases in expression include elements set forth in Table 24 such as SEQ ID NO: 1030.

[0021] In yet another embodiment of the targeted insertion methods described above, the donor polynucleotide is tethered to a crRNA by a covalent bond, a non-covalent bond, or a combination of covalent and non-covalent bonds. In a related embodiment, the disclosure provides a composition for targeting a genome comprising a donor polynucleotide tethered to a cRNA by a covalent bond, a non-covalent bond, or a combination of covalent and non-covalent bonds.

[0022] In another embodiment of the targeted modification methods described above, the loss of epigenetic marks after modifying occurs in less than 0.1%, 0.08%, 0.05%, 0.02%, or 0.01% of the genome. In yet another embodiment of the targeted modification methods described above, the genome of the modified plant cell is more than 99%, e.g., more than 99.5% or more than 99.9% identical to the genome of the parent cell.

[0023] In yet another embodiment of the targeted modification methods described above, at least one of the targeted modifications is an insertion and at least one insertion is in a region of the genome that is recalcitrant to meiotic or mitotic recombination.

[0024] In certain embodiments of the plant cell genome targeting methods described above, the plant cell is a member of a pool of cells being targeted. In related embodiments, the modified cells within the pool are characterized by sequencing after targeting.

[0025] The disclosure also provides modified Zea sp. plant cells comprising at least two separately targeted insertions in its genome, wherein the insertions are determined relative to a parent plant cell, and wherein the modified plant cell is devoid of mitotically or meiotically generated genetic or epigenetic changes relative to the parent plant cell. In certain embodiments, these plant cells are obtained using the multiplex targeted insertion methods described above. In certain embodiments, the modified plant cells comprise at least two separately targeted insertions, wherein the genome of the modified plant cell is at least 95%, at least 96%, at least 97%, at least 98%, at least 99%, at least 99.5%, at least 99.9%, or at least 99.99% identical to the parent cell, taking all genetic or epigenetic changes into account.

[0026] The disclosure also provides modified plant cells resulting from any of the claimed methods described, as well as recombinant plants grown from those modified plant cells.

[0027] In some embodiments, the disclosure provides a method of manufacturing a processed plant product, comprising: (a) modifying a plant cell according to any of the targeted methods described above; (b) growing a modified plant from said plant cell, and (c) processing the modified plant into a processed product, thereby manufacturing a processed plant product. In related embodiments, the processed product may be meal, oil, juice, sugar, starch, fiber, an extract, wood or wood pulp, flour, cloth or some other commodity plant product. The disclosure also provides a method of manufacturing a plant product, comprising (a) modifying a plant cell according to any of the targeted methods described above, (b) growing an modified plant from said plant cell, and (c) harvesting a product of the modified plant, thereby manufacturing a plant product. In related embodiments, the plant product is a product may be leaves, fruit, vegetables, nuts, seeds, oil, wood, flowers, cones, branches, hay, fodder, silage, stover, straw, pollen, or some other harvested commodity product. In further related embodiments, the processed products and harvested products are packaged.

### BRIEF DESCRIPTION OF THE DRAWINGS

[0028] FIGS. 1A-1C depict the Clustal-W (1.83) multiple-sequence alignment of the next-generation sequencing reads of the maize (Zea mays) alcohol dehydrogenase ADH1 that were amplified and sequenced as described in detail in Example 4. Sequencing reads are identified by a number beginning with the letter P and are listed from highest to lowest percentage of total NGS reads. P1 identifies the non-edited sequence, i. e., identical to the reference sequence identified at the beginning of the list by an “NCBI_gi” number (NCBI accession number). Asterisks in the last line of the alignment indicate conserved nucleotides.

[0029] FIGS. 2A-2D depict the Clustal-W (1.83) multiple-sequence alignment of the next-generation sequencing reads of the maize (Zea mays) alcohol dehydrogenase ADH1 that were amplified and sequenced as described in detail in Example 8. Sequencing reads are identified by a number beginning with the letter P and are listed from highest to lowest percentage of total NGS reads. P1 identifies the non-edited sequence, i.e., identical to the reference sequence identified at the beginning of the list by an “NCBI_gi” number (NCBI accession number). Asterisks in the last line of the alignment indicate conserved nucleotides.

[0030] FIG. 3A, B depict results of experiments described in detail in Example 20. FIG. 3AA illustrates mean relative gene expression of Dof1 (solid black bars), NRT2.2 (solid white bars), and Gln1.4 (diagonally hatched bars) genes, normalized to tubulin expression. Null controls are indicated by the “-” symbol. FIG. 3B illustrates mean relative gene expression of the unmodified, endogenous AMT3, normalized to tubulin expression, in the presence of KCl (solid black bars) or KNO₃ (solid white bars), in cells where the Dof1, NRT2.2, and Gln1.4 genes were individually modified, or where all three genes were modified (“Multiplex”). Null controls are indicated by the “-” symbol.

[0031] FIG. 4 depicts results of experiments described in detail in Example 23, and illustrates mean relative gene expression of AMT3 (solid white bars) and Lc (diagonally hatched bars) genes, normalized to tubulin expression, in the presence of KCl or KNO₃. “3 hrs” and “18 hrs” refer to cells that were subjected to a second (ZmLc-Pro3/OCS homologue) transfection or editing reaction 3 or 18 hours, respectively, after a first (AMT3-Pro1/AtNRE) transfection. Null controls are indicated by “Empty”.

[0032] FIG. 5 depicts insertion efficiency of a dimer (SEQ ID NO: 1047), trimer (SEQ ID NO: 1030), or tetramer (SEQ ID NO: 1048) of the 12 nucleotide core element (SEQ ID NO: 343) inserted into the ZmGln1-3 promoter.

[0033] FIG. 6 depicts the effect of a dimer (SEQ ID NO: 1047), trimer (SEQ ID NO: 1030), or tetramer (SEQ ID NO: 1048) of the core element 12 nucleotide sequence (SEQ ID NO:343) inserted into the ZmGln1-3 promoter on ZmGln1-3 expression, compared to controls.

[0034] FIG. 7 depicts expression of Lc (first panel), Gln1-3 (middle panel) and Gln1-4 (right panel) in protoplasts with insertion of the 36 bp enhancer (SEQ ID NO: 1030) in these promoters (black bars), compared to expression in protoplasts without the 36 bp enhancer (white bars). Three biological replicates for each are shown separately.

[0035] FIG. 8 depicts expression of Gln1-3 (relative to Actin1) in T0 events with the 36 nt enhancer insertion (SEQ ID NO: 1030) in the Gln1-3 promoter (black bar), compared to expression in TO events without the enhancer insertion or wild-type B104 control (white bars).

[0036] FIG. 9 depicts expression of Gln1-3 (relative to ZmAct1) in T1 individuals with the 36 bp enhancer (SEQ ID NO: 1030) insertion in the Gln1-3 promoter compared to siblings without the enhancer insertion or wild-types, in primary root, mesocotyl, and root.

[0037] FIG. 10A, B, C depicts phenotypes of enhancer insertion lines, and extensions of the method. FIG. 10A shows the % of plants with 1, 1.5 or 2 visibly senesced leaves at 38 days after sowing in a population segregating for presence of the 36 bp enhancer element in the promoter of AlaATa, grown under low nitrogen (left). FIG. 10B shows the relative chlorophyll (SPAD) of leaf 3 at 38 DAS in the same segregating population (right); dots represent data points from individual plants, grey bars show the average per group (N=21; 14); p-value calculated by Student's t-test. FIG. 10C shows the % of plants with 0, 1, 1.5, 2 or 2.5 visibly senesced leaves at 38 days after sowing in a population segregating for presence of 3×PE in the promoter of GS2, grown under either low nitrogen or normal nitrogen (N=20; 14; 17; 18).

### DETAILED DESCRIPTION

### Definitions

[0038] The phrase “allelic variant” as used herein refers to a polynucleotide or polypeptide sequence variant that occurs in a different strain, variety, or isolate of a given organism.

[0039] The term “and/or” where used herein is to be taken as specific disclosure of each of the two specified features or components with or without the other. Thus, the term “and/or” as used in a phrase such as “A and/or B” herein is intended to include “A and B,” “A or B,” “A” (alone), and “B” (alone). Likewise, the term “and/or” as used in a phrase such as “A, B, and/or C” is intended to encompass each of the following embodiments: A, B, and C; A, B, or C; A or C; A or B; B or C; A and C; A and B; B and C; A (alone); B (alone); and C (alone).

[0040] As used herein, the terms “Cpf1” and “Cas12a” are used interchangeably to refer to the same RNA guided DNA endonuclease.

[0041] As used herein, the terms “Cas12j” and “CasΦ” are used interchangeably herein to refer to the same grouping of RNA directed nucleases. Such “Cas12j” and “CasΦ” include nucleases disclosed in Pausch et al. 2020 (DOI: 10.1126/science.abb1400).

[0042] As used herein, the phrase “biological sample” refers to either intact or non-intact (e.g., milled seed or plant tissue, chopped plant tissue, lyophilized tissue) plant tissue. It may also be an extract comprising intact or non-intact seed or plant tissue. The biological sample can comprise flour, meal, syrup, oil, starch, and cereals manufactured in whole or in part to contain crop plant by-products. In certain embodiments, the biological sample is “non-regenerable” (i.e., incapable of being regenerated into a plant or plant part).

[0043] Unless otherwise stated, nucleic acid sequences in the text of this specification are given, when read from left to right, in the 5′ to 3′ direction. Nucleic acid sequences may be provided as DNA or as RNA, as specified; disclosure of one necessarily defines the other, as well as necessarily defines the exact complements, as is known to one of ordinary skill in the art. Where a term is provided in the singular, the inventors also contemplate aspects of the disclosure described by the plural of that term.

[0044] As used herein, the terms “include,” “includes,” and “including” are to be construed as at least having the features to which they refer while not excluding any additional unspecified features.

[0045] By “polynucleotide” is meant a nucleic acid molecule containing multiple nucleotides and refers to “oligonucleotides” (defined here as a polynucleotide molecule of between 2-25 nucleotides in length) and polynucleotides of 26 or more nucleotides. Polynucleotides are generally described as single- or double-stranded. Where a polynucleotide contains double-stranded regions formed by intra- or intermolecular hybridization, the length of each double-stranded region is conveniently described in terms of the number of base pairs. Aspects of this disclosure include the use of polynucleotides or compositions containing polynucleotides; embodiments include one or more oligonucleotides or polynucleotides or a mixture of both, including single- or double-stranded RNA or single- or double-stranded DNA or single- or double-stranded DNA/RNA hybrids or chemically modified analogues or a mixture thereof. In various embodiments, a polynucleotide (such as a single-stranded DNA/RNA hybrid or a double-stranded DNA/RNA hybrid) includes a combination of ribonucleotides and deoxyribonucleotides (e. g., synthetic polynucleotides consisting mainly of ribonucleotides but with one or more terminal deoxyribonucleotides or synthetic polynucleotides consisting mainly of deoxyribonucleotides but with one or more terminal dideoxyribonucleotides), or includes non-canonical nucleotides such as inosine, thiouridine, or pseudouridine. In embodiments, the polynucleotide includes chemically modified nucleotides (see, e. g., Verma and Eckstein (1998) Annu. Rev. Biochem., 67:99-134); for example, the naturally occurring phosphodiester backbone of an oligonucleotide or polynucleotide can be partially or completely modified with phosphorothioate, phosphorodithioate, or methylphosphonate internucleotide linkage modifications; modified nucleoside bases or modified sugars can be used in oligonucleotide or polynucleotide synthesis; and oligonucleotides or polynucleotides can be labelled with a fluorescent moiety (e. g., fluorescein or rhodamine or a fluorescence resonance energy transfer or FRET pair of chromophore labels) or other label (e. g., biotin or an isotope). Modified nucleic acids, particularly modified RNAs, are disclosed in U.S. Pat. No. 9,464,124, incorporated by reference in its entirety herein. For some polynucleotides (especially relatively short polynucleotides, e. g., oligonucleotides of 2-25 nucleotides or base-pairs, or polynucleotides of about 25 to about 300 nucleotides or base-pairs), use of modified nucleic acids, such as locked nucleic acids (“LNAs”), is useful to modify physical characteristics such as increased melting temperature (Tₘ) of a polynucleotide duplex incorporating DNA or RNA molecules that contain one or more LNAs; see, e. g., You et al. (2006) Nucleic Acids Res., 34:1-11 (e60), doi:10.1093/nar/gkl175.

[0046] In the context of the genome targeting methods described herein, the phrase “contacting a genome” with an agent means that an agent responsible for effecting the targeted genome modification (e.g., a break, a deletion, a rearrangement, or an insertion) is delivered to the interior of the cell so the directed mutagenic action can take place.

[0047] To the extent to which any of the preceding definitions is inconsistent with definitions provided in any patent or non-patent reference incorporated herein by reference, any patent or non-patent reference cited herein, or in any patent or non-patent reference found elsewhere, it is understood that the preceding definition will be used herein.

### Tools and Methods for Multiplex Editing

[0048] CRISPR technology for editing the genes of eukaryotes is disclosed in U. S. Patent Application Publications 2016/0138008A1 and US2015/0344912A1, and in U.S. Pat. Nos. 8,697,359, 8,771,945, 8,945,839, 8,999,641, 8,993,233, 8,895,308, 8,865,406, 8,889,418, 8,871,445, 8,889,356, 8,932,814, 8,795,965, and 8,906,616. Cpf1 (Cas12a) endonuclease and corresponding guide RNAs and PAM sites are disclosed in U. S. Patent Application Publication 2016/0208243 A1. Other CRISPR nucleases useful for editing genomes include C2c1 and C2c3 (see Shmakov et al. (2015) Mol. Cell, 60:385-397) and CasX (Cas12e) and CasY (Cas12d; see Burstein et al. (2016) Nature, doi:10.1038/nature21059). Other useful Cas nucleases for editing genomes include Cas12f, Cas12i, and Cas12j nucleases (Kim et al. (2022) Nat Biotechnol 40, 94-102 (DOI: 10.1038/s41587-021-01009-z); Zhang et al. (2020) Nat Struct Mol Biol. 2020; 27(11):1069-1076. DOI:10.1038/s41594-020-0499-0; Pausch et al. (2020) Science. 2020 Jul. 17; 369(6501):333-337, DOI: 10.1126/science.abb1400). Plant RNA promoters for expressing CRISPR guide RNA and plant codon-optimized CRISPR Cas9 endonuclease are disclosed in International Patent Application PCT/US2015/018104 (published as WO 2015/131101 and claiming priority to U.S. Provisional Patent Application 61/945,700). Methods of using CRISPR technology for genome editing in plants are disclosed in in U. S. Patent Application Publications US 2015/0082478A1 and US 2015/0059010A1 and in International Patent Application PCT/US2015/038767 A1 (published as WO 2016/007347 and claiming priority to U.S. Provisional Patent Application 62/023,246).

[0049] CRISPR (Clustered Regularly Interspaced Short Palindromic Repeats)/Cas (CRISPR-associated) systems, or CRISPR systems, are adaptive defense systems originally discovered in bacteria and archaea. CRISPR systems use RNA-guided nucleases termed CRISPR-associated or “Cas” endonucleases (e. g., Cas9 or Cpf1) to cleave foreign DNA. In a typical CRISPR/Cas system, a Cas endonuclease is directed to a target nucleotide sequence (e. g., a site in the genome that is to be sequence-edited) by sequence-specific, non-coding “guide RNAs” that target single- or double-stranded DNA sequences. In microbial hosts, CRISPR loci encode both Cas endonucleases and “CRISPR arrays” of the non-coding RNA elements that determine the specificity of the CRISPR-mediated nucleic acid cleavage.

[0050] Three classes (1-111) of CRISPR systems have been identified across a wide range of bacterial hosts. The well characterized class II CRISPR systems use a single Cas endonuclease (rather than multiple Cas proteins). One class II CRISPR system includes a type II Cas endonuclease such as Cas9, a CRISPR RNA (“crRNA”), and a trans-activating crRNA (“tracrRNA”). The crRNA contains a “guide RNA”, typically a 20-nucleotide RNA sequence that corresponds to (i. e., is identical or nearly identical to, or alternatively is complementary or nearly complementary to) a 20-nucleotide target DNA sequence. The crRNA also contains a region that binds to the tracrRNA to form a partially double-stranded structure which is cleaved by RNase III, resulting in a crRNA/tracrRNA hybrid. The crRNA/tracrRNA hybrid then directs the Cas9 endonuclease to recognize and cleave the target DNA sequence.

[0051] The target DNA sequence must generally be adjacent to a “protospacer adjacent motif” (“PAM”) that is specific for a given Cas endonuclease; however, PAM sequences are short and relatively non-specific, appearing throughout a given genome. CRISPR endonucleases identified from various prokaryotic species have unique PAM sequence requirements; examples of PAM sequences include 5′-NGG (Streptococcus pyogenes), 5′-NNAGAA (Streptococcus thermophilus CRISPR1), 5′-NGGNG (Streptococcus thermophilus CRISPR3), 5′-NNGRRT or 5′-NNGRR (Staphylococcus aureus Cas9, SaCas9), and 5′-NNNGATT (Neisseria meningitidis). Some endonucleases, e. g., Cas9 endonucleases, are associated with G-rich PAM sites, e. g., 5′-NGG, and perform blunt-end cleaving of the target DNA at a location 3 nucleotides upstream from (5′ from) the PAM site.

[0052] Another class II CRISPR system includes the type V endonuclease Cpf1 (also known as Cas12a), which is a smaller endonuclease than is Cas9; examples include AsCpf1 (from Acidaminococcus sp.) and LbCpf1 (from Lachnospiraceae sp.). Cpf1-associated CRISPR arrays are processed into mature crRNAs without the requirement of a tracrRNA; in other words, a Cpf1 system requires only the Cpf1 nuclease and a crRNA to cleave the target DNA sequence. Cpf1 endonucleases, are associated with T-rich PAM sites, e. g., 5′-TTN. Cpf1 can also recognize a 5′-CTA PAM motif. Cpf1 cleaves the target DNA by introducing an offset or staggered double-strand break with a 4- or 5-nucleotide 5′ overhang, for example, cleaving a target DNA with a 5-nucleotide offset or staggered cut located 18 nucleotides downstream from (3′ from) from the PAM site on the coding strand and 23 nucleotides downstream from the PAM site on the complimentary strand; the 5-nucleotide overhang that results from such offset cleavage allows more precise genome editing by DNA insertion by homologous recombination than by insertion at blunt-end cleaved DNA. See, e. g., Zetsche et al. (2015) Cell, 163:759-771. Other CRISPR nucleases useful in methods and compositions of the disclosure include C2c1 and C2c3 (see Shmakov et al. (2015) Mol. Cell, 60:385-397). Like other CRISPR nucleases, C2c1 from Alicyclobacillus acidoterrestris (AacC2c1; amino acid sequence with accession ID TOD7A2, deposited on-line at www[dot]ncbi[dot]nlm[dot]nih[dot]gov/protein/1076761101) requires a guide RNA and PAM recognition site; C2c1 cleavage results in a staggered seven-nucleotide DSB in the target DNA (see Yang et al. (2016) Cell, 167:1814-1828.e12) and is reported to have high mismatch sensitivity, thus reducing off-target effects (see Liu et al. (2016) Mol. Cell, available on line at dx[dot]doi[dot]org/10[dot]1016/j[dot]molcel[dot]2016[dot]11.040). Yet other CRISPR nucleases include nucleases identified from the genomes of uncultivated microbes, such as CasX and CasY (e. g., a CRISPR-associated protein CasY from an uncultured Parcubacteria group bacterium, amino acid sequence with accession ID APG80656, deposited on-line at www[dot]ncbi[dot]nlm[dot]nih[dot]gov/protein/APG80656.1]); see Burstein et al. (2016) Nature, doi:10.1038/nature21059.

[0053] For the purposes of gene editing, CRISPR arrays can be designed to contain one or multiple guide RNA sequences corresponding to a desired target DNA sequence; see, for example, Cong et al. (2013) Science, 339:819-823; Ran et al. (2013) Nature Protocols, 8:2281-2308. At least 16 or 17 nucleotides of gRNA sequence are required by Cas9 for DNA cleavage to occur; for Cpf1 at least 16 nucleotides of gRNA sequence are needed to achieve detectable DNA cleavage and at least 18 nucleotides of gRNA sequence were reported necessary for efficient DNA cleavage in vitro; see Zetsche et al. (2015) Cell, 163:759-771. In practice, guide RNA sequences are generally designed to have a length of between 17-24 nucleotides (frequently 19, 20, or 21 nucleotides) and exact complementarity (i. e., perfect base-pairing) to the targeted gene or nucleic acid sequence; guide RNAs having less than 100% complementarity to the target sequence can be used (e. g., a gRNA with a length of 20 nucleotides and between 1-4 mismatches to the target sequence) but can increase the potential for off-target effects. The design of effective guide RNAs for use in plant genome editing is disclosed in U. S. Patent Application Publication 2015/0082478 A1, the entire specification of which is incorporated herein by reference. More recently, efficient gene editing has been achieved using a chimeric “single guide RNA” (“sgRNA”), an engineered (synthetic) single RNA molecule that mimics a naturally occurring crRNA-tracrRNA complex and contains both a tracrRNA (for binding the nuclease) and at least one crRNA (to guide the nuclease to the sequence targeted for editing); see, for example, Cong et al. (2013) Science, 339:819-823; Xing et al. (2014) BMC Plant Biol., 14:327-340. Chemically modified sgRNAs have been demonstrated to be effective in genome editing; see, for example, Hendel et al. (2015) Nature Biotechnol., 985-991.

[0054] CRISPR-type genome editing has value in various aspects of agriculture research and development. CRISPR elements, i.e., CRISPR endonucleases and CRISPR single-guide RNAs, are useful in effecting genome editing without remnants of the CRISPR elements or selective genetic markers occurring in progeny. Alternatively, genome-inserted CRISPR elements are useful in plant lines adapted for multiplex genetic screening and breeding. For instance, a plant species can be created to express one or more of a CRISPR endonuclease such as a Cas9- or a Cpf1-type endonuclease or combinations with unique PAM recognition sites. Cpf1 endonuclease and corresponding guide RNAs and PAM sites are disclosed in U. S. Patent Application Publication 2016/0208243 A1, which is incorporated herein by reference for its disclosure of DNA encoding Cpf1 endonucleases and guide RNAs and PAM sites. Introduction of one or more of a wide variety of CRISPR guide RNAs that interact with CRISPR endonucleases integrated into a plant genome or otherwise provided to a plant is useful for genetic editing for providing desired phenotypes or traits, for trait screening, or for trait introgression. Multiple endonucleases can be provided in expression cassettes with the appropriate promoters to allow multiple genome editing in a spatially or temporally separated fashion in either in chromosome DNA or episome DNA.

[0055] Whereas wild-type Cas9 generates double-strand breaks (DSBs) at specific DNA sequences targeted by a gRNA, a number of CRISPR endonucleases having modified functionalities are available, for example: (1) a “nickase” version of Cas9 generates only a single-strand break; (2) a catalytically inactive Cas9 (“dCas9”) does not cut the target DNA but interferes with transcription; (3) dCas9 on its own or fused to a repressor peptide can repress gene expression; (4) dCas9 fused to an activator peptide can activate or increase gene expression; (5) dCas9 fused to FokI nuclease (“dCas9-FokI”) can be used to generate DSBs at target sequences homologous to two gRNAs; and (6) dCas9 fused to histone-modifying enzymes (e. g., histone acetyltransferases, histone methyltransferases, histone deacetylases, and histone demethylases) can be used to alter the epigenome in a site-specific manner, for example, by changing the methylation or acetylation status at a particular locus. See, e. g., the numerous CRISPR/Cas9 plasmids disclosed in and publicly available from the Addgene repository (Addgene, 75 Sidney St., Suite 550A, Cambridge, MA 02139; addgene[dot]org/crispr/). A “double nickase” Cas9 that introduces two separate double-strand breaks, each directed by a separate guide RNA, is described as achieving more accurate genome editing by Ran et al. (2013) Cell, 154:1380-1389.

[0056] In some embodiments, the methods of targeted modification described herein provide a means for avoiding unwanted epigenetic losses that can arise from tissue culturing modified plant cells (see, e.g., Stroud et al. eLife 2013; 2:e00354). Using the methods described herein in the absence of tissue culture, a loss of epigenetic marking may occur in less than 0.01% of the genome. This contrasts with results obtained with rice plants where tissue culture methods may result in losses of DNA methylation that occur, on average, as determined by bisulfite sequencing, at 1344 places that are on average 334 base pairs long, which means a loss of DNA methylation at an average of 0.1% of the genome (Stroud, 2013). In other words, the loss in marks using the targeted modification techniques described herein without tissue culture is 10 times lower than the loss observed when tissue culture techniques are relied on. In certain embodiments of the novel modified plant cells described herein, the modified plant cell or plant does not have significant losses of methylation compared to a non-modified parent plant cell or plant; in other words, the methylation pattern of the genome of the modified plant cell or plant is not greatly different from the methylation pattern of the genome of the parent plant cell or plant; in embodiments, the difference between the methylation pattern of the genome of the modified plant cell or plant and that of the parent plant cell or plant is less than 0.1%, 0.05%, 0.02%, or 0.01% of the genome, or less than 0.005% of the genome, or less than 0.001% of the genome (see, e. g., Stroud et al. (2013) eLife 2:e00354; DOI: 10.7554/eLife.00354).

[0057] CRISPR technology for editing the genes of eukaryotes is disclosed in U.S. Patent Application Publications 2016/0138008A1 and US2015/0344912A1, and in U.S. Pat. Nos. 8,697,359, 8,771,945, 8,945,839, 8,999,641, 8,993,233, 8,895,308, 8,865,406, 8,889,418, 8,871,445, 8,889,356, 8,932,814, 8,795,965, and 8,906,616. Cpf1 endonuclease and corresponding guide RNAs and PAM sites are disclosed in U.S. Patent Application Publication 2016/0208243 A1. Plant RNA promoters for expressing CRISPR guide RNA and plant codon-optimized CRISPR Cas9 endonuclease are disclosed in International Patent Application PCT/US2015/018104 (published as WO 2015/131101 and claiming priority to U.S. Provisional Patent Application 61/945,700). Methods of using CRISPR technology for genome editing in plants are disclosed in in U.S. Patent Application Publications US 2015/0082478A1 and US 2015/0059010A1 and in International Patent Application PCT/US2015/038767 A1 (published as WO 2016/007347 and claiming priority to U.S. Provisional Patent Application 62/023,246). All of the patent publications referenced in this paragraph are incorporated herein by reference in their entirety.

[0058] In some embodiments, one or more vectors driving expression of one or more polynucleotides encoding elements of a genome-editing system (e. g., encoding a guide RNA or a nuclease) are introduced into a plant cell or a plant protoplast, whereby these elements, when expressed, result in alteration of a target nucleotide sequence. In embodiments, a vector comprises a regulatory element such as a promoter operably linked to one or more polynucleotides encoding elements of a genome-editing system. In such embodiments, expression of these polynucleotides can be controlled by selection of the appropriate promoter, particularly promoters functional in a plant cell; useful promoters include constitutive, conditional, inducible, and temporally or spatially specific promoters (e. g., a tissue specific promoter, a developmentally regulated promoter, or a cell cycle regulated promoter). In embodiments, the promoter is operably linked to nucleotide sequences encoding multiple guide RNAs, wherein the sequences encoding guide RNAs are separated by a cleavage site such as a nucleotide sequence encoding a microRNA recognition/cleavage site or a self-cleaving ribozyme (see, e. g., Ferré-D'Amaré and Scott (2014) Cold Spring Harbor Perspectives Biol., 2:a003574). In embodiments, the promoter is a pol II promoter operably linked to a nucleotide sequence encoding one or more guide RNAs. In embodiments, the promoter operably linked to one or more polynucleotides encoding elements of a genome-editing system is a constitutive promoter that drives DNA expression in plant cells; in embodiments, the promoter drives DNA expression in the nucleus or in an organelle such as a chloroplast or mitochondrion. Examples of constitutive promoters include a CaMV 35S promoter as disclosed in U.S. Pat. Nos. 5,858,742 and 5,322,938, a rice actin promoter as disclosed in U.S. Pat. No. 5,641,876, a maize chloroplast aldolase promoter as disclosed in U.S. Pat. No. 7,151,204, and a nopaline synthase (NOS) and octopine synthase (OCS) promoter from Agrobacterium tumefaciens. In embodiments, the promoter operably linked to one or more polynucleotides encoding elements of a genome-editing system is a promoter from figwort mosaic virus (FMV), a RUBISCO promoter, or a pyruvate phosphate dikinase (PDK) promoter, which is active in the chloroplasts of mesophyll cells. Other contemplated promoters include cell-specific or tissue-specific or developmentally regulated promoters, for example, a promoter that limits the expression of the nucleic acid targeting system to germline or reproductive cells (e. g., promoters of genes encoding DNA ligases, recombinases, replicases, or other genes specifically expressed in germline or reproductive cells); in such embodiments, the nuclease-mediated genetic modification (e. g., chromosomal or episomal double-stranded DNA cleavage) is limited only those cells from which DNA is inherited in subsequent generations, which is advantageous where it is desirable that expression of the genome-editing system be limited in order to avoid genotoxicity or other unwanted effects. All of the patent publications referenced in this paragraph are incorporated herein by reference in their entirety.

[0059] In some embodiments, elements of a genome-editing system (e.g., an RNA-guided nuclease and a guide RNA) are operably linked to separate regulatory elements on separate vectors. In other embodiments, two or more elements of a genome-editing system expressed from the same or different regulatory elements or promoters are combined in a single vector, optionally with one or more additional vectors providing any additional necessary elements of a genome-editing system not included in the first vector. For example, multiple guide RNAs can be expressed from one vector, with the appropriate RNA-guided nuclease expressed from a second vector. In another example, one or more vectors for the expression of one or more guide RNAs (e. g., crRNAs or sgRNAs) are delivered to a cell (e. g., a plant cell or a plant protoplast) that expresses the appropriate RNA-guided nuclease, or to a cell that otherwise contains the nuclease, such as by way of prior administration thereto of a vector for in vivo expression of the nuclease.

[0060] Genome-editing system elements that are combined in a single vector may be arranged in any suitable orientation, such as one element located 5′ with respect to (“upstream” of) or 3′ with respect to (“downstream” of) a second element. The coding sequence of one element may be located on the same or opposite strand of the coding sequence of a second element, and oriented in the same or opposite direction. In embodiments, the endonuclease and the nucleic acid-targeting guide RNA may be operably linked to and expressed from the same promoter. In embodiments, a single promoter drives expression of a transcript encoding an endonuclease and the guide RNA, embedded within one or more intron sequences (e. g., each in a different intron, two or more in at least one intron, or all in a single intron), which can be plant-derived; such use of introns is especially contemplated when the expression vector is being transformed or transfected into a monocot plant cell or a monocot plant protoplast.

[0061] Expression vectors provided herein may contain a DNA segment near the 3′ end of an expression cassette that acts as a signal to terminate transcription and directs polyadenylation of the resultant mRNA. Such a 3′ element is commonly referred to as a “3′-untranslated region” or “3′-UTR” or a “polyadenylation signal”. Useful 3′ elements include: Agrobacterium tumefaciens nos 3′, tml 3′, tmr 3′, tms 3′, ocs 3′, and tr7 3′ elements disclosed in U.S. Pat. No. 6,090,627, incorporated herein by reference, and 3′ elements from plant genes such as the heat shock protein 17, ubiquitin, and fructose-1,6-biphosphatase genes from wheat (Triticum aestivum), and the glutelin, lactate dehydrogenase, and beta-tubulin genes from rice (Oryza sativa), disclosed in U. S. Patent Application Publication 2002/0192813 A1, incorporated herein by reference.

[0062] In certain embodiments, a vector or an expression cassette includes additional components, e. g., a polynucleotide encoding a drug resistance or herbicide gene or a polynucleotide encoding a detectable marker such as green fluorescent protein (GFP) or beta-glucuronidase (gus) to allow convenient screening or selection of cells expressing the vector. In embodiments, the vector or expression cassette includes additional elements for improving delivery to a plant cell or plant protoplast or for directing or modifying expression of one or more genome-editing system elements, for example, fusing a sequence encoding a cell-penetrating peptide, localization signal, transit, or targeting peptide to the RNA-guided nuclease, or adding a nucleotide sequence to stabilize a guide RNA; such fusion proteins (and the polypeptides encoding such fusion proteins) or combination polypeptides, as well as expression cassettes and vectors for their expression in a cell, are specifically claimed. In embodiments, an RNA-guided nuclease (e. g., Cas9, Cpf1, CasY, CasX, C2c1, C2c3, Cas12f, Cas12i, or Cas12j) is fused to a localization signal, transit, or targeting peptide, e. g., a nuclear localization signal (NLS), a chloroplast transit peptide (CTP), or a mitochondrial targeting peptide (MTP); in a vector or an expression cassette, the nucleotide sequence encoding any of these can be located either 5′ and/or 3′ to the DNA encoding the nuclease. For example, a plant-codon-optimized Cas9 (pco-Cas9) from Streptococcus pyogenes and S. thermophilus containing nuclear localization signals and codon-optimized for expression in maize is disclosed in PCT/US2015/018104 (published as WO/2015/131101 and claiming priority to U.S. Provisional Patent Application 61/945,700), incorporated herein by reference. In another example, a chloroplast-targeting RNA is appended to the 5′ end of an mRNA encoding an endonuclease to drive the accumulation of the mRNA in chloroplasts; see Gomez, et al. (2010) Plant Signal Behav., 5: 1517-1519. In an embodiment, a Cas9 from Streptococcus pyogenes is fused to a nuclear localization signal (NLS), such as the NLS from SV40. In an embodiment, a Cas9 from Streptococcus pyogenes is fused to a cell-penetrating peptide (CPP), such as octa-arginine or nona-arginine or a homoarginine 12-mer oligopeptide, or a CPP disclosed in the database of cell-penetrating peptides CPPsite 2.0, publicly available at crdd[dot]osdd[dot]net/raghava/cppsite/. In an example, a Cas9 from Streptococcus pyogenes (which normally carries a net positive charge) is modified at the N-terminus with a negatively charged glutamate peptide “tag” and at the C-terminus with a nuclear localization signal (NLS); when mixed with cationic arginine gold nanoparticles (ArgNPs), self-assembled nanoassemblies were formed which were shown to provide good editing efficiency in human cells; see Mout et al. (2017) ACS Nano, doi:10.1021/acsnano.6b07600. In an embodiment, a Cas9 from Streptococcus pyogenes is fused to a chloroplast transit peptide (CTP) sequence. In embodiments, a CTP sequence is obtained from any nuclear gene that encodes a protein that targets a chloroplast, and the isolated or synthesized CTP DNA is appended to the 5′ end of the DNA that encodes a nuclease targeted for use in a chloroplast. Chloroplast transit peptides and their use are described in U.S. Pat. Nos. 5,188,642, 5,728,925, and 8,420,888, all of which are incorporated herein by reference in their entirety. Specifically, the CTP nucleotide sequences provided with the sequence identifier (SEQ ID) numbers 12-15 and 17-22 of U.S. Pat. No. 8,420,888 are incorporated herein by reference. In an embodiment, a Cas9 from Streptococcus pyogenes is fused to a mitochondrial targeting peptide (MTP), such as a plant MTP sequence; see, e. g., Jores et al. (2016) Nature Communications, 7:12036-12051.

[0063] Plasmids designed for use in plants and encoding CRISPR genome editing elements (CRISPR nucleases and guide RNAs) are publicly available from plasmid repositories such as Addgene (Cambridge, Massachusetts; also see “addgene[dot]com”) or can be designed using publicly disclosed sequences, e. g., sequences of CRISPR nucleases. In embodiments, such plasmids are used to co-express both CRISPR nuclease mRNA and guide RNA(s); in other embodiments, CRISPR endonuclease mRNA and guide RNA are encoded on separate plasmids. In embodiments, the plasmids are Agrobacterium TI plasmids. Materials and methods for preparing expression cassettes and vectors for CRISPR endonuclease and guide RNA for stably integrated and/or transient plant transformation are disclosed in PCT/US2015/018104 (published as WO/2015/131101 and claiming priority to U.S. Provisional Patent Application 61/945,700), U. S. Patent Application Publication 2015/0082478 A1, and PCT/US2015/038767 (published as WO/2016/007347 and claiming priority to U.S. Provisional Patent Application 62/023,246), all of which are incorporated herein by reference in their entirety. In embodiments, such expression cassettes are isolated linear fragments, or are part of a larger construct that includes bacterial replication elements and selectable markers; such embodiments are useful, e. g., for particle bombardment or nanoparticle delivery or protoplast transformation. In embodiments, the expression cassette is adjacent to or located between T-DNA borders or contained within a binary vector, e. g., for Agrobacterium-mediated transformation. In embodiments, a plasmid encoding a CRISPR nuclease is delivered to cell (such as a plant cell or a plant protoplast) for stable integration of the CRISPR nuclease into the genome of cell, or alternatively for transient expression of the CRISPR nuclease. In embodiments, plasmids encoding a CRISPR nuclease are delivered to a plant cell or a plant protoplast to achieve stable or transient expression of the CRISPR nuclease, and one or multiple guide RNAs (such as a library of individual guide RNAs or multiple pooled guide RNAs) or plasmids encoding the guide RNAs are delivered to the plant cell or plant protoplast individually or in combinations, thus providing libraries or arrays of plant cells or plant protoplasts (or of plant callus or whole plants derived therefrom), in which a variety of genome edits are provided by the different guide RNAs. A pool or arrayed collection of diverse modified plant cells comprising subsets of targeted modifications (e.g., a collection of plant cells or plants where some plants are homozygous and some are heterozygous for one, two, three or more targeted modifications) can be compared to determine the function of modified sequences (e.g., mutated or deleted sequences or genes) or the function of sequences being inserted. In other words, the methods and tools described herein can be used to perform “reverse genetics.”

[0064] In certain embodiments where the genome-editing system is a CRISPR system, expression of the guide RNA is driven by a plant U6 spliceosomal RNA promoter, which can be native to the genome of the plant cell or from a different species, e. g., a U6 promoter from maize, tomato, or soybean such as those disclosed in PCT/US2015/018104 (published as WO 2015/131101 and claiming priority to U.S. Provisional Patent Application 61/945,700), incorporated herein by reference, or a homologue thereof; such a promoter is operably linked to DNA encoding the guide RNA for directing an endonuclease, followed by a suitable 3′ element such as a U6 poly-T terminator. In another embodiment, an expression cassette for expressing guide RNAs in plants is used, wherein the promoter is a plant U3, 7SL (signal recognition particle RNA), U2, or U5 promoter, or chimerics thereof, e. g., as described in PCT/US2015/018104 (published as WO 2015/131101 and claiming priority to U.S. Provisional Patent Application 61/945,700), incorporated herein by reference. When multiple or different guide RNA sequences are used, a single expression construct may be used to correspondingly direct the genome editing activity to the multiple or different target sequences in a cell, such a plant cell or a plant protoplast. In various embodiments, a single vector includes 1, 2, 3, 4, 5, 6, 7, 8, 9, 10, about 15, about 20, or more guide RNA sequences; in other embodiments, 1, 2, 3, 4, 5, 6, 7, 8, 9, 10, about 15, about 20, or more guide RNA sequences are provided on multiple vectors, which can be delivered to one or multiple plant cells or plant protoplasts (e. g., delivered to an array of plant cells or plant protoplasts, or to a pooled population of plant cells or plant protoplasts).

[0065] In embodiments, one or more guide RNAs and the corresponding RNA-guided nuclease are delivered together or simultaneously. In other embodiments, one or more guide RNAs and the corresponding RNA-guided nuclease are delivered separately; these can be delivered in separate, discrete steps and using the same or different delivery techniques. In an example, an RNA-guided nuclease is delivered to a cell (such as a plant cell or plant protoplast) by particle bombardment, on carbon nanotubes, or by Agrobacterium-mediated transformation, and one or more guide RNAs is delivered to the cell in a separate step using the same or different delivery technique. In embodiments, an RNA-guided nuclease encoded by a DNA molecule or an mRNA is delivered to a cell with enough time prior to delivery of the guide RNA to permit expression of the nuclease in the cell; for example, an RNA-guided nuclease encoded by a DNA molecule or an mRNA is delivered to a plant cell or plant protoplast between 1-12 hours (e. g., about 1, 2, 3, 4, 5, 6, 7, 8, 9, 10, 11, or 12 hours, or between about 1-6 hours or between about 2-6 hours) prior to the delivery of the guide RNA to the plant cell or plant protoplast. In embodiments, whether the RNA-guided nuclease is delivered simultaneously with or separately from an initial dose of guide RNA, succeeding “booster” doses of guide RNA are delivered subsequent to the delivery of the initial dose; for example, a second “booster” dose of guide RNA is delivered to a plant cell or plant protoplast between 1-12 hours (e. g., about 1, 2, 3, 4, 5, 6, 7, 8, 9, 10, 11, or 12 hours, or between about 1-6 hours or between about 2-6 hours) subsequent to the delivery of the initial dose of guide RNA to the plant cell or plant protoplast. Similarly, in some embodiments, multiple deliveries of an RNA-guided nuclease or of a DNA molecule or an mRNA encoding an RNA-guided nuclease are used to increase efficiency of the genome modification.

[0066] In embodiments, the desired genome modification involves non-homologous recombination, in this case non-homologous end-joining of genomic sequence across one or more introduced double-strand breaks; generally, such embodiments do not require a donor template having homology “arms” (regions of homologous or complimentary sequence to genomic sequence flanking the site of the DSB). In various embodiments described herein, donor polynucleotides encoding sequences for targeted insertion at double-stranded breaks are single-stranded polynucleotides comprising RNA or DNA or both types of nucleotides; or the donor polynucleotides are at least partially double-stranded and comprise RNA, DNA or both types of nucleotides. Other modified nucleotides may also be used.

[0067] In other embodiments, the desired genome modification involves homologous recombination, wherein one or more double-stranded DNA break in the target nucleotide sequence is generated by the RNA-guided nuclease and guide RNA(s), followed by repair of the break(s) using a homologous recombination mechanism (“homology-directed repair”). In such embodiments, a donor template that encodes the desired nucleotide sequence to be inserted or knocked-in at the double-stranded break and generally having homology “arms” (regions of homologous or complimentary sequence to genomic sequence flanking the site of the DSB) is provided to the cell (such as a plant cell or plant protoplast); examples of suitable templates include single-stranded DNA templates and double-stranded DNA templates (e. g., in the form of a plasmid). In general, a donor template encoding a nucleotide change over a region of less than about 50 nucleotides is conveniently provided in the form of single-stranded DNA; larger donor templates (e. g., more than 100 nucleotides) are often conveniently provided as double-stranded DNA plasmids.

[0068] In certain embodiments directed to the targeted incorporation of sequences by homologous recombination, a donor template has a core nucleotide sequence that differs from the target nucleotide sequence (e. g., a homologous endogenous genomic region) by at least 1, at least 5, at least 10, at least 20, at least 30, at least 40, at least 50, or more nucleotides. This core sequence is flanked by “homology arms” or regions of high sequence identity with the targeted nucleotide sequence; in embodiments, the regions of high identity include at least 10, at least 50, at least 100, at least 150, at least 200, at least 300, at least 400, at least 500, at least 600, at least 750, or at least 1000 nucleotides on each side of the core sequence. In embodiments where the donor template is in the form of a single-stranded DNA, the core sequence is flanked by homology arms including at least 10, at least 20, at least 30, at least 40, at least 50, at least 60, at least 70, at least 80, or at least 100 nucleotides on each side of the core sequence. In embodiments where the donor template is in the form of a double-stranded DNA plasmid, the core sequence is flanked by homology arms including at least 500, at least 600, at least 700, at least 800, at least 900, or at least 1000 nucleotides on each side of the core sequence. In an embodiment, two separate double-strand breaks are introduced into the cell's target nucleotide sequence with a “double nickase” Cas9 (see Ran et al. (2013) Cell, 154:1380-1389), followed by delivery of the donor template.

### Delivery Methods and Agents

[0069] Aspects of the disclosure involve various treatments employed to deliver to a plant cell or protoplast a guide RNA (gRNA), such as a crRNA or sgRNA (or a polynucleotide encoding such), and/or a polynucleotide encoding a sequence for targeted insertion at a double-strand break in a genome. In embodiments, one or more treatments are employed to deliver the gRNA into a plant cell or plant protoplast, e. g., through barriers such as a cell wall or a plasma membrane or nuclear envelope or other lipid bilayer.

[0070] Unless otherwise stated, the various compositions and methods described herein for delivering guide RNAs and nucleases to a plant cell or protoplast are also generally useful for delivering donor polynucleotides to the cell. The delivery of donor polynucleotides can be simultaneous with, or separate from (generally after) delivery of the nuclease and guide RNA to the cell. For example, a donor polynucleotide can be transiently introduced into a plant cell or plant protoplast, optionally with the nuclease and/or gRNA; in certain embodiments, the donor template is provided to the plant cell or plant protoplast in a quantity that is sufficient to achieve the desired insertion of the donor polynucleotide sequence but donor polynucleotides do not persist in the plant cell or plant protoplast after a given period of time (e. g., after one or more cell division cycles).

[0071] In certain embodiments, a gRNA- or donor polynucleotide, in addition to other agents involved in targeted modifications, can be delivered to a plant cell or protoplast by directly contacting the plant cell or protoplast with a composition comprising the gRNA(s) or donor polynucleotide(s). For example, a gRNA-containing composition in the form of a liquid, a solution, a suspension, an emulsion, a reverse emulsion, a colloid, a dispersion, a gel, liposomes, micelles, an injectable material, an aerosol, a solid, a powder, a particulate, a nanoparticle, or a combination thereof can be applied directly to a plant cell (or plant part or tissue containing the plant cell) or plant protoplast (e. g., through abrasion or puncture or otherwise disruption of the cell wall or cell membrane, by spraying or dipping or soaking or otherwise directly contacting, or by microinjection). In certain embodiments, a plant cell (or plant part or tissue containing the plant cell) or plant protoplast is soaked in a liquid gRNA-containing composition, whereby the gRNA is delivered to the plant cell or plant protoplast. In embodiments, the gRNA-containing composition is delivered using negative or positive pressure, for example, using vacuum infiltration or application of hydrodynamic or fluid pressure. In embodiments, the gRNA-containing composition is introduced into a plant cell or plant protoplast, e. g., by microinjection or by disruption or deformation of the cell wall or cell membrane, for example by physical treatments such as by application of negative or positive pressure, shear forces, or treatment with a chemical or physical delivery agent such as surfactants, liposomes, or nanoparticles; see, e. g., delivery of materials to cells employing microfluidic flow through a cell-deforming constriction as described in US Published Patent Application 2014/0287509, incorporated by reference in its entirety herein. Other techniques useful for delivering the gRNA-containing composition to a plant cell or plant protoplast include: ultrasound or sonication; vibration, friction, shear stress, vortexing, cavitation; centrifugation or application of mechanical force; mechanical cell wall or cell membrane deformation or breakage; enzymatic cell wall or cell membrane breakage or permeabilization; abrasion or mechanical scarification (e. g., abrasion with carborundum or other particulate abrasive or scarification with a file or sandpaper) or chemical scarification (e. g., treatment with an acid or caustic agent); and electroporation. In embodiments, the gRNA-containing composition is provided by bacterially mediated (e. g., Agrobacterium sp., Rhizobium sp., Sinorhizobium sp., Mesorhizobium sp., Bradyrhizobium sp., Azobacter sp., Phyllobacterium sp.) transfection of the plant cell or plant protoplast with a polynucleotide encoding the gRNA; see, e. g., Broothaerts et al. (2005) Nature, 433:629-633. Any of these techniques or a combination thereof are alternatively employed on the plant part or tissue or intact plant (or seed) from which a plant cell or plant protoplast is optionally subsequently obtained or isolated; in embodiments, the gRNA-containing composition is delivered in a separate step after the plant cell or plant protoplast has been obtained or isolated.

[0072] In embodiments, a treatment employed in delivery of a gRNA to a plant cell or plant protoplast is carried out under a specific thermal regime, which can involve one or more appropriate temperatures, e. g., chilling or cold stress (exposure to temperatures below that at which normal plant growth occurs), or heating or heat stress (exposure to temperatures above that at which normal plant growth occurs), or treating at a combination of different temperatures. In embodiments, a specific thermal regime is carried out on the plant cell or plant protoplast, or on a plant or plant part from which a plant cell or plant protoplast is subsequently obtained or isolated, in one or more steps separate from the gRNA delivery.

[0073] In embodiments, a whole plant or plant part or seed, or an isolated plant cell or plant protoplast, or the plant or plant part from which a plant cell or plant protoplast is obtained or isolated, is treated with one or more delivery agents which can include at least one chemical, enzymatic, or physical agent, or a combination thereof. In embodiments, a gRNA-containing composition further includes one or more one chemical, enzymatic, or physical agent for delivery. In embodiments that further include the step of providing an RNA-guided nuclease or a polynucleotide that encodes the RNA-guided nuclease, a gRNA-containing composition including the RNA-guided nuclease or polynucleotide that encodes the RNA-guided nuclease further includes one or more one chemical, enzymatic, or physical agent for delivery. Treatment with the chemical, enzymatic or physical agent can be carried out simultaneously with the gRNA delivery, with the RNA-guided nuclease delivery, or in one or more separate steps that precede or follow the gRNA delivery or the RNA-guided nuclease delivery. In embodiments, a chemical, enzymatic, or physical agent, or a combination of these, is associated or complexed with the polynucleotide composition, with the gRNA or polynucleotide that encodes or is processed to the gRNA, or with the RNA-guided nuclease or polynucleotide that encodes the RNA-guided nuclease; examples of such associations or complexes include those involving non-covalent interactions (e. g., ionic or electrostatic interactions, hydrophobic or hydrophilic interactions, formation of liposomes, micelles, or other heterogeneous composition) and covalent interactions (e. g., peptide bonds, bonds formed using cross-linking agents). In non-limiting examples, a gRNA or polynucleotide that encodes or is processed to the gRNA is provided as a liposomal complex with a cationic lipid; a gRNA or polynucleotide that encodes or is processed to the gRNA is provided as a complex with a carbon nanotube; and an RNA-guided nuclease is provided as a fusion protein between the nuclease and a cell-penetrating peptide.

[0074] Examples of agents useful for delivering a gRNA or polynucleotide that encodes or is processed to the gRNA or a nuclease or polynucleotide that encodes the nuclease include the various cationic liposomes and polymer nanoparticles reviewed by Zhang et al. (2007) J. Controlled Release, 123:1-10, and the cross-linked multilamellar liposomes described in U. S. Patent Application Publication 2014/0356414 A1, incorporated by reference in its entirety herein.

[0075] In embodiments, the chemical agent is at least one selected from the group consisting of:
[0076] (a) solvents (e. g., water, dimethylsulfoxide, dimethylformamide, acetonitrile, N-pyrrolidine, pyridine, hexamethylphosphoramide, alcohols, alkanes, alkenes, dioxanes, polyethylene glycol, and other solvents miscible or emulsifiable with water or that will dissolve phosphonucleotides in non-aqueous systems);
[0077] (b) fluorocarbons (e. g., perfluorodecalin, perfluoromethyldecalin);
[0078] (c) glycols or polyols (e. g., propylene glycol, polyethylene glycol);
[0079] (d) surfactants, including cationic surfactants, anionic surfactants, non-ionic surfactants, and amphiphilic surfactants, e. g., alkyl or aryl sulfates, phosphates, sulfonates, or carboxylates; primary, secondary, or tertiary amines; quaternary ammonium salts; sultaines, betaines; cationic lipids; phospholipids; tallowamine; bile acids such as cholic acid; long chain alcohols; organosilicone surfactants including nonionic organosilicone surfactants such as trisiloxane ethoxylate surfactants or a silicone polyether copolymer such as a copolymer of polyalkylene oxide modified heptamethyl trisiloxane and allyloxypolypropylene glycol methylether (commercially available as SILWET L-77™ brand surfactant having CAS Number 27306-78-1 and EPA Number CAL. REG. NO. 5905-50073-AA, Momentive Performance Materials, Inc., Albany, N.Y.); specific examples of useful surfactants include sodium lauryl sulfate, the Tween series of surfactants, Triton-X100, Triton-X114, CHAPS and CHAPSO, Tergitol-type NP-40, Nonidet P-40;
[0080] (e) lipids, lipoproteins, lipopolysaccharides;
[0081] (f) acids, bases, caustic agents;
[0082] (g) peptides, proteins, or enzymes (e. g., cellulase, pectolyase, maceroenzyme, pectinase), including cell-penetrating or pore-forming peptides (e. g., (B0100)2K8, Genscript; poly-lysine, poly-arginine, or poly-homoarginine peptides; gamma zein, see U. S. Patent Application publication 2011/0247100, incorporated herein by reference in its entirety; transcription activator of human immunodeficiency virus type 1 (“HIV-1 Tat”) and other Tat proteins, see, e. g., www[dot]lifetein[dot]com/Cell_Penetrating_Peptides[dot]html and Jarver (2012) Mol. Therapy-Nucleic Acids, 1:e27,1-17); octa-arginine or nona-arginine; poly-homoarginine (see Unnamalai et al. (2004) FEBS Letters, 566:307-310); see also the database of cell-penetrating peptides CPPsite 2.0 publicly available at crdd[dot]osdd[dot]net/raghava/cppsite/
[0083] (h) RNase inhibitors;
[0084] (i) cationic branched or linear polymers such as chitosan, poly-lysine, DEAE-dextran, polyvinylpyrrolidone (“PVP”), or polyethylenimine (“PEI”, e. g., PEI, branched, MW 25,000, CAS #9002-98-6; PEI, linear, MW 5000, CAS #9002-98-6; PEI linear, MW 2500, CAS #9002-98-6);
[0085] (j) dendrimers (see, e. g., U. S. Patent Application Publication 2011/0093982, incorporated herein by reference in its entirety);
[0086] (k) counter-ions, amines or polyamines (e. g., spermine, spermidine, putrescine), osmolytes, buffers, and salts (e. g., calcium phosphate, ammonium phosphate);
[0087] (l) polynucleotides (e. g., non-specific double-stranded DNA, salmon sperm DNA);
[0088] (m) transfection agents (e. g., Lipofectin®, Lipofectamine®, and Oligofectamine®, and Invivofectamine® (all from Thermo Fisher Scientific, Waltham, MA), PepFect (see Ezzat et al. (2011) Nucleic Acids Res., 39:5284-5298), TransIt® transfection reagents (Mirus Bio, LLC, Madison, WI), and poly-lysine, poly-homoarginine, and poly-arginine molecules including octo-arginine and nono-arginine as described in Lu et al. (2010) J. Agric. Food Chem., 58:2288-2294);
[0089] (n) antibiotics, including non-specific DNA double-strand-break-inducing agents (e. g., phleomycin, bleomycin, talisomycin); and
[0090] (o) antioxidants (e. g., glutathione, dithiothreitol, ascorbate).

[0091] In embodiments, the chemical agent is provided simultaneously with the gRNA (or polynucleotide encoding the gRNA or that is processed to the gRNA), for example, the polynucleotide composition including the gRNA further includes one or more chemical agent. In embodiments, the gRNA or polynucleotide encoding the gRNA or that is processed to the gRNA is covalently or non-covalently linked or complexed with one or more chemical agent; for example, the gRNA or polynucleotide encoding the gRNA or that is processed to the gRNA can be covalently linked to a peptide or protein (e. g., a cell-penetrating peptide or a pore-forming peptide) or non-covalently complexed with cationic lipids, polycations (e. g., polyamines), or cationic polymers (e. g., PEI). In embodiments, the gRNA or polynucleotide encoding the gRNA or that is processed to the gRNA is complexed with one or more chemical agents to form, e. g., a solution, liposome, micelle, emulsion, reverse emulsion, suspension, colloid, or gel.

[0092] In embodiments, the physical agent is at least one selected from the group consisting of particles or nanoparticles (e. g., particles or nanoparticles made of materials such as carbon, silicon, silicon carbide, gold, tungsten, polymers, or ceramics) in various size ranges and shapes, magnetic particles or nanoparticles (e. g., silenceMag Magnetotransfection™ agent, OZ Biosciences, San Diego, CA), abrasive or scarifying agents, needles or microneedles, matrices, and grids. In embodiments, particulates and nanoparticulates are useful in delivery of the polynucleotide composition or the nuclease or both. Useful particulates and nanoparticles include those made of metals (e. g., gold, silver, tungsten, iron, cerium), ceramics (e. g., aluminum oxide, silicon carbide, silicon nitride, tungsten carbide), polymers (e. g., polystyrene, polydiacetylene, and poly(3,4-ethylenedioxythiophene) hydrate), semiconductors (e. g., quantum dots), silicon (e. g., silicon carbide), carbon (e. g., graphite, graphene, graphene oxide, or carbon nanosheets, nanocomplexes, or nanotubes), and composites (e. g., polyvinylcarbazole/graphene, polystyrene/graphene, platinum/graphene, palladium/graphene nanocomposites). In embodiments, such particulates and nanoparticulates are further covalently or non-covalently functionalized, or further include modifiers or cross-linked materials such as polymers (e. g., linear or branched polyethylenimine, poly-lysine), polynucleotides (e. g., DNA or RNA), polysaccharides, lipids, polyglycols (e. g., polyethylene glycol, thiolated polyethylene glycol), polypeptides or proteins, and detectable labels (e. g., a fluorophore, an antigen, an antibody, or a quantum dot). In various embodiments, such particulates and nanoparticles are neutral, or carry a positive charge, or carry a negative charge. Embodiments of compositions including particulates include those formulated, e. g., as liquids, colloids, dispersions, suspensions, aerosols, gels, and solids. Embodiments include nanoparticles affixed to a surface or support, e. g., an array of carbon nanotubes vertically aligned on a silicon or copper wafer substrate. Embodiments include polynucleotide compositions including particulates (e. g., gold or tungsten or magnetic particles) delivered by a Biolistic-type technique or with magnetic force. The size of the particles used in Biolistics is generally in the “microparticle” range, for example, gold microcarriers in the 0.6, 1.0, and 1.6 micrometer size ranges (see, e. g., instruction manual for the Helios® Gene Gun System, Bio-Rad, Hercules, CA; Randolph-Anderson et al. (2015) “Sub-micron gold particles are superior to larger particles for efficient Biolistic® transformation of organelles and some cell types”, Bio-Rad US/EG Bulletin 2015), but successful Biolistics delivery using larger (40 nanometer) nanoparticles has been reported in cultured animal cells; see O'Brian and Lummis (2011) BMC Biotechnol., 11:66-71. Other embodiments of useful particulates are nanoparticles, which are generally in the nanometer (nm) size range or less than 1 micrometer, e. g., with a diameter of less than about 1 nm, less than about 3 nm, less than about 5 nm, less than about 10 nm, less than about 20 nm, less than about 40 nm, less than about 60 nm, less than about 80 nm, and less than about 100 nm. Specific, non-limiting embodiments of nanoparticles commercially available (all from Sigma-Aldrich Corp., St. Louis, MO) include gold nanoparticles with diameters of 5, 10, or 15 n; silver nanoparticles with particle sizes of 10, 20, 40, 60, or 100 nm; palladium “nanopowder” of less than 25 nm particle size; single-, double-, and multi-walled carbon nanotubes, e. g., with diameters of 0.7-1.1, 1.3-2.3, 0.7-0.9, or 0.7-1.3 n, or with nanotube bundle dimensions of 2-10 nm by 1-5 micrometers, 6-9 nm by 5 micrometers, 7-15 nm by 0.5-10 micrometers, 7-12 nm by 0.5-10 micrometers, 110-170 nm by 5-9 micrometers, 6-13 nm by 2.5-20 micrometers. Embodiments include polynucleotide compositions including materials such as gold, silicon, cerium, or carbon, e. g., gold or gold-coated nanoparticles, silicon carbide whiskers, carborundum, porous silica nanoparticles, gelatin/silica nanoparticles, nanoceria or cerium oxide nanoparticles (CNPs), carbon nanotubes (CNTs) such as single-, double-, or multi-walled carbon nanotubes and their chemically functionalized versions (e. g., carbon nanotubes functionalized with amide, amino, carboxylic acid, sulfonic acid, or polyethylene glycol moieties), and graphene or graphene oxide or graphene complexes; see, for example, Wong et al. (2016) Nano Lett., 16:1161-1172; Giraldo et al. (2014) Nature Materials, 13:400-409; Shen et al. (2012) Theranostics, 2:283-294; Kim et al. (2011) Bioconjugate Chem., 22:2558-2567; Wang et al. (2010) J. Am. Chem. Soc. Comm., 132:9274-9276; Zhao et al. (2016) Nanoscale Res. Lett., 11:195-203; and Choi et al. (2016) J. Controlled Release, 235:222-235. See also, for example, the various types of particles and nanoparticles, their preparation, and methods for their use, e. g., in delivering polynucleotides and polypeptides to cells, disclosed in U. S. Patent Application Publications 2010/0311168, 2012/0023619, 2012/0244569, 2013/0145488, 2013/0185823, 2014/0096284, 2015/0040268, 2015/0047074, and 2015/0208663, all of which are incorporated herein by reference in their entirety.

[0093] In embodiments wherein the gRNA (or polynucleotide encoding the gRNA) is provided in a composition that further includes an RNA-guided nuclease (or a polynucleotide that encodes the RNA-guided nuclease), or wherein the method further includes the step of providing an RNA-guided nuclease or a polynucleotide that encodes the RNA-guided nuclease, one or more one chemical, enzymatic, or physical agent can similarly be employed. In embodiments, the RNA-guided nuclease (or polynucleotide encoding the RNA-guided nuclease) is provided separately, e. g., in a separate composition including the RNA-guided nuclease or polynucleotide encoding the RNA-guided nuclease. Such compositions can include other chemical or physical agents (e. g., solvents, surfactants, proteins or enzymes, transfection agents, particulates or nanoparticulates), such as those described above as useful in the polynucleotide composition used to provide the gRNA. For example, porous silica nanoparticles are useful for delivering a DNA recombinase into maize cells; see, e. g., Martin-Ortigosa et al. (2015) Plant Physiol., 164:537-547. In an embodiment, the polynucleotide composition includes a gRNA and Cas9 nuclease, and further includes a surfactant and a cell-penetrating peptide. In an embodiment, the polynucleotide composition includes a plasmid that encodes both an RNA-guided nuclease and at least on gRNA, and further includes a surfactant and carbon nanotubes. In an embodiment, the polynucleotide composition includes multiple gRNAs and an mRNA encoding the RNA-guided nuclease, and further includes gold particles, and the polynucleotide composition is delivered to a plant cell or plant protoplast by Biolistics.

[0094] In related embodiments, one or more one chemical, enzymatic, or physical agent can be used in one or more steps separate from (preceding or following) that in which the gRNA is provided. In an embodiment, the plant or plant part from which a plant cell or plant protoplast is obtained or isolated is treated with one or more one chemical, enzymatic, or physical agent in the process of obtaining or isolating the plant cell or plant protoplast. In embodiments, the plant or plant part is treated with an abrasive, a caustic agent, a surfactant such as Silwet L-77 or a cationic lipid, or an enzyme such as cellulase.

[0095] In embodiments, a gRNA is delivered to plant cells or plant protoplasts prepared or obtained from a plant, plant part, or plant tissue that has been treated with the polynucleotide compositions (and optionally the nuclease). In embodiments, one or more one chemical, enzymatic, or physical agent, separately or in combination with the polynucleotide composition, is provided/applied at a location in the plant or plant part other than the plant location, part, or tissue from which the plant cell or plant protoplast is obtained or isolated. In embodiments, the polynucleotide composition is applied to adjacent or distal cells or tissues and is transported (e. g., through the vascular system or by cell-to-cell movement) to the meristem from which plant cells or plant protoplasts are subsequently isolated. In embodiments, a gRNA-containing composition is applied by soaking a seed or seed fragment or zygotic or somatic embryo in the gRNA-containing composition, whereby the gRNA is delivered to the seed or seed fragment or zygotic or somatic embryo from which plant cells or plant protoplasts are subsequently isolated. In embodiments, a flower bud or shoot tip is contacted with a gRNA-containing composition, whereby the gRNA is delivered to cells in the flower bud or shoot tip from which plant cells or plant protoplasts are subsequently isolated. In embodiments, a gRNA-containing composition is applied to the surface of a plant or of a part of a plant (e. g., a leaf surface), whereby the gRNA is delivered to tissues of the plant from which plant cells or plant protoplasts are subsequently isolated. In embodiments a whole plant or plant tissue is subjected to particle- or nanoparticle-mediated delivery (e. g., Biolistics or carbon nanotube or nanoparticle delivery) of a gRNA-containing composition, whereby the gRNA is delivered to cells or tissues from which plant cells or plant protoplasts are subsequently isolated.

### Methods of Modulating Expression of a Sequence of Interest in a Genome

[0096] In one aspect, the disclosure provides a method of changing expression of a sequence of interest in a genome, including integrating a sequence encoded by a polynucleotide (such as a double-stranded DNA, a single-stranded DNA, a single-stranded DNA/RNA hybrid, or a double-stranded DNA/RNA hybrid) donor molecule at the site of at least one double-strand break (DSB) in a genome. The method permits site-specific integration of heterologous sequence at the site of at least one DSB, and thus at one or more locations in a genome, such as a genome of a plant cell. In embodiments, the genome is that of a nucleus, mitochondrion, or plastid in a plant cell.

[0097] By “integration of heterologous sequence” is meant integration or insertion of one or more nucleotides, resulting in a sequence (including the inserted nucleotide(s) as well as at least some adjacent nucleotides of the genomic sequence flanking the site of insertion at the DSB) that is heterologous, i. e., would not otherwise or does not normally occur at the site of insertion. (The term “heterologous” is also used to refer to a given sequence in relationship to another—e. g., the sequence of the polynucleotide donor molecule is heterologous to the sequence at the site of the DSB wherein the polynucleotide is integrated.)

[0098] The at least one DSB is introduced into the genome by any suitable technique; in embodiments one or more DSBs is introduced into the genome in a site- or sequence-specific manner, for example, by use of at least one of the group of DSB-inducing agents consisting of: (a) a nuclease capable of effecting site-specific alteration of a target nucleotide sequence, selected from the group consisting of an RNA-guided nuclease, an RNA-guided DNA endonuclease, a type II Cas nuclease, a Cas9, a type V Cas nuclease, a Cpf1 (Cas12a), a CasY (Cas12d), a CasX (Cas12e), a C2c1, a C2c3, Cas12f, Cas12i, Cas12j, an engineered nuclease, a codon-optimized nuclease, a zinc-finger nuclease (ZFN), a transcription activator-like effector nuclease (TAL-effector nuclease), an Argonaute, and a meganuclease or engineered meganuclease; (b) a polynucleotide encoding one or more nucleases capable of effecting site-specific alteration (such as introduction of a DSB) of a target nucleotide sequence; and (c) a guide RNA (gRNA) for an RNA-guided nuclease, or a DNA encoding a gRNA for an RNA-guided nuclease. In embodiments, one or more DSBs is introduced into the genome by use of both a guide RNA (gRNA) and the corresponding RNA-guided nuclease. In an example, one or more DSBs is introduced into the genome by use of a ribonucleoprotein (RNP) that includes both a gRNA (e. g., a single-guide RNA or sgRNA that includes both a crRNA and a tracrRNA) and a Cas9. It is generally desirable that the sequence encoded by the polynucleotide donor molecule is integrated at the site of the DSB at high efficiency. One measure of efficiency is the percentage or fraction of the population of cells that have been treated with a DSB-inducing agent and polynucleotide donor molecule, and in which a sequence encoded by the polynucleotide donor molecule is successfully introduced at the DSB correctly located in the genome. The efficiency of genome editing including integration of a sequence encoded by a polynucleotide donor molecule at a DSB in the genome is assessed by any suitable method such as a heteroduplex cleavage assay or by sequencing, as described elsewhere in this disclosure. In various embodiments, the DSB is induced in the correct location in the genome at a comparatively high efficiency, e. g., at about 10, about 15, about 20, about 30, about 40, about 50, about 60, about 70, or about 80 percent efficiency, or at greater than 80, 85, 90, or 95 percent efficiency (measured as the percentage of the total population of cells in which the DSB is induced at the correct location in the genome). In various embodiments, a sequence encoded by the polynucleotide donor molecule is integrated at the site of the DSB at a comparatively high efficiency, e. g., at about 10, about 15, about 20, about 30, about 40, about 50, about 60, about 70, or about 80 percent efficiency, or at greater than 80, 85, 90, or 95 percent efficiency (measured as the percentage of the total population of cells in which the polynucleotide molecule is integrated at the site of the DSB in the correct location in the genome).

[0099] Apart from the CRISPR-type nucleases, other nucleases capable of effecting site-specific alteration of a target nucleotide sequence include zinc-finger nucleases (ZFNs), transcription activator-like effector nucleases (TAL-effector nucleases or TALENs), Argonaute proteins, and a meganuclease or engineered meganuclease. Zinc finger nucleases (ZFNs) are engineered proteins comprising a zinc finger DNA-binding domain fused to a nucleic acid cleavage domain, e. g., a nuclease. The zinc finger binding domains provide specificity and can be engineered to specifically recognize any desired target DNA sequence. For a review of the construction and use of ZFNs in plants and other organisms, see, e. g., Urnov et al. (2010) Nature Rev. Genet., 11:636-646. The zinc finger DNA binding domains are derived from the DNA-binding domain of a large class of eukaryotic transcription factors called zinc finger proteins (ZFPs). The DNA-binding domain of ZFPs typically contains a tandem array of at least three zinc “fingers” each recognizing a specific triplet of DNA. A number of strategies can be used to design the binding specificity of the zinc finger binding domain. One approach, termed “modular assembly”, relies on the functional autonomy of individual zinc fingers with DNA. In this approach, a given sequence is targeted by identifying zinc fingers for each component triplet in the sequence and linking them into a multifinger peptide. Several alternative strategies for designing zinc finger DNA binding domains have also been developed. These methods are designed to accommodate the ability of zinc fingers to contact neighboring fingers as well as nucleotides bases outside their target triplet. Typically, the engineered zinc finger DNA binding domain has a novel binding specificity, compared to a naturally-occurring zinc finger protein. Modification methods include, for example, rational design and various types of selection. Rational design includes, for example, the use of databases of triplet (or quadruplet) nucleotide sequences and individual zinc finger amino acid sequences, in which each triplet or quadruplet nucleotide sequence is associated with one or more amino acid sequences of zinc fingers which bind the particular triplet or quadruplet sequence. See, e. g., U.S. Pat. Nos. 6,453,242 and 6,534,261, both incorporated herein by reference in their entirety. Exemplary selection methods (e. g., phage display and yeast two-hybrid systems) are well known and described in the literature. In addition, enhancement of binding specificity for zinc finger binding domains has been described in U.S. Pat. No. 6,794,136, incorporated herein by reference in its entirety. In addition, individual zinc finger domains may be linked together using any suitable linker sequences. Examples of linker sequences are publicly known, e. g., see U.S. Pat. Nos. 6,479,626; 6,903,185; and 7,153,949, incorporated herein by reference in their entirety. The nucleic acid cleavage domain is non-specific and is typically a restriction endonuclease, such as Fokl. This endonuclease must dimerize to cleave DNA. Thus, cleavage by Fokl as part of a ZFN requires two adjacent and independent binding events, which must occur in both the correct orientation and with appropriate spacing to permit dimer formation. The requirement for two DNA binding events enables more specific targeting of long and potentially unique recognition sites. Fokl variants with enhanced activities have been described; see, e. g., Guo et al. (2010) J. Mol. Biol., 400:96-107.

[0100] Transcription activator like effectors (TALEs) are proteins secreted by certain Xanthomonas species to modulate gene expression in host plants and to facilitate the colonization by and survival of the bacterium. TALEs act as transcription factors and modulate expression of resistance genes in the plants. Recent studies of TALEs have revealed the code linking the repetitive region of TALEs with their target DNA-binding sites. TALEs comprise a highly conserved and repetitive region consisting of tandem repeats of mostly 33 or 34 amino acid segments. The repeat monomers differ from each other mainly at amino acid positions 12 and 13. A strong correlation between unique pairs of amino acids at positions 12 and 13 and the corresponding nucleotide in the TALE-binding site has been found. The simple relationship between amino acid sequence and DNA recognition of the TALE binding domain allows for the design of DNA binding domains of any desired specificity. TALEs can be linked to a non-specific DNA cleavage domain to prepare genome editing proteins, referred to as TAL-effector nucleases or TALENs. As in the case of ZFNs, a restriction endonuclease, such as Fokl, can be conveniently used. For a description of the use of TALENs in plants, see Mahfouz et al. (2011) Proc. Natl. Acad. Sci. USA, 108:2623-2628 and Mahfouz (2011) GM Crops, 2:99-103.

[0101] Argonauts are proteins that can function as sequence-specific endonucleases by binding a polynucleotide (e. g., a single-stranded DNA or single-stranded RNA) that includes sequence complementary to a target nucleotide sequence) that guides the Argonaut to the target nucleotide sequence and effects site-specific alteration of the target nucleotide sequence; see, e. g., U. S. Patent Application Publication 2015/0089681, incorporated herein by reference in its entirety.

[0102] Another method of effecting targeted changes to a genome is the use of triple-forming peptide nucleic acids (PNAs) designed to bind site-specifically to genomic DNA via strand invasion and the formation of PNA/DNA/PNA triplexes (via both Watson-Crick and Hoogsteen binding) with a displaced DNA strand. PNAs consist of a charge neutral peptide-like backbone and nucleobases. The nucleobases hybridize to DNA with high affinity. The triplexes then recruit the cell's endogenous DNA repair systems to initiate site-specific modification of the genome. The desired sequence modification is provided by single-stranded ‘donor DNAs’ which are co-delivered as templates for repair. See, e. g., Bahal R et al (2016) Nature Communications, Oct. 26, 2016.

[0103] In related embodiments, zinc finger nucleases, TALENs, and Argonautes are used in conjunction with other functional domains. For example, the nuclease activity of these nucleic acid targeting systems can be altered so that the enzyme binds to but does not cleave the DNA. Examples of functional domains include transposase domains, integrase domains, recombinase domains, resolvase domains, invertase domains, protease domains, DNA methyltransferase domains, DNA hydroxylmethylase domains, DNA demethylase domains, histone acetylase domains, histone deacetylase domains, nuclease domains, repressor domains, activator domains, nuclear-localization signal domains, transcription-regulatory protein (or transcription complex recruiting) domains, cellular uptake activity associated domains, nucleic acid binding domains, antibody presentation domains, histone modifying enzymes, recruiter of histone modifying enzymes; inhibitor of histone modifying enzymes, histone methyltransferases, histone demethylases, histone kinases, histone phosphatases, histone ribosylases, histone deribosylases, histone ubiquitinases, histone deubiquitinases, histone biotinases and histone tail proteases. Non-limiting examples of functional domains include a transcriptional activation domain, a transcription repression domain, and an SHH1, SUVH2, or SUVH9 polypeptide capable of reducing expression of a target nucleotide sequence via epigenetic modification; see, e. g., U. S. Patent Application Publication 2016/0017348, incorporated herein by reference in its entirety. Genomic DNA may also be modified via base editing using a fusion between a catalytically inactive Cas9 (dCas9) is fused to a cytidine deaminase which convert cytosine (C) to uridine (U), thereby effecting a C to T substitution; see Komor et al. (2016) Nature, 533:420-424.

[0104] In embodiments, the guide RNA (gRNA) has a sequence of between 16-24 nucleotides in length (e. g., 16, 17, 18, 19, 20, 21, 22, 23, or 24 nucleotides in length). Specific embodiments include gRNAs of 19, 20, or 21 nucleotides in length and having 100% complementarity to the target nucleotide sequence. In many embodiments the gRNA has exact complementarity (i. e., perfect base-pairing) to the target nucleotide sequence; in certain other embodiments the gRNA has less than 100% complementarity to the target nucleotide sequence. The design of effective gRNAs for use in plant genome editing is disclosed in U. S. Patent Application Publication 2015/0082478 A1, the entire specification of which is incorporated herein by reference. In embodiments where multiple gRNAs are employed, the multiple gRNAs can be delivered separately (as separate RNA molecules or encoded by separate DNA molecules) or in combination, e. g., as an RNA molecule containing multiple gRNA sequences, or as a DNA molecule encoding an RNA molecule containing multiple gRNA sequences; see, for example, U. S. Patent Application Publication 2016/0264981 A1, the entire specification of which is incorporated herein by reference, which discloses RNA molecules including multiple RNA sequences (such as gRNA sequences) separated by tRNA cleavage sequences. In other embodiments, a DNA molecule encodes multiple gRNAs which are separated by other types of cleavable transcript, for example, small RNA (e. g., miRNA, siRNA, or ta-siRNA) recognition sites which can be cleaved by the corresponding small RNA, or dsRNA-forming regions which can be cleaved by a Dicer-type ribonuclease, or sequences which are recognized by RNA nucleases such as Cys4 ribonuclease from Pseudomonas aeruginosa; see, e. g., U.S. Pat. No. 7,816,581, the entire specification of which is incorporated herein by reference, which discloses in FIG. 27 and elsewhere in the specification pol II promoter-driven DNA constructs encoding RNA transcripts that are released by cleavage. Efficient Cas9-mediated gene editing has been achieved using a chimeric “single guide RNA” (“sgRNA”), an engineered (synthetic) single RNA molecule that mimics a naturally occurring crRNA-tracrRNA complex and contains both a tracrRNA (for binding the nuclease) and at least one crRNA (to guide the nuclease to the sequence targeted for editing). In other embodiments, self-cleaving ribozyme sequences can be used to separate multiple gRNA sequences within a transcript.

[0105] Thus, in certain embodiments wherein the nuclease is a Cas9-type nuclease, the gRNA can be provided as a polynucleotide composition including: (a) a CRISPR RNA (crRNA) that includes the gRNA together with a separate tracrRNA, or (b) at least one polynucleotide that encodes a crRNA and a tracrRNA (on a single polynucleotide or on separate polynucleotides), or (c) at least one polynucleotide that is processed into one or more crRNAs and a tracrRNA. In other embodiments wherein the nuclease is a Cas9-type nuclease, the gRNA can be provided as a polynucleotide composition including a CRISPR RNA (crRNA) that includes the gRNA, and the required tracrRNA is provided in a separate composition or in a separate step, or is otherwise provided to the cell (for example, to a plant cell or plant protoplast that stably or transiently expresses the tracrRNA from a polynucleotide encoding the tracrRNA). In other embodiments wherein the nuclease is a Cas9-type nuclease, the gRNA can be provided as a polynucleotide composition comprising: (a) a single guide RNA (sgRNA) that includes the gRNA, or (b) a polynucleotide that encodes a sgRNA, or (c) a polynucleotide that is processed into a sgRNA. Cpf1-mediated gene editing does not require a tracrRNA; thus, in embodiments wherein the nuclease is a Cpf1-type nuclease, the gRNA is provided as a polynucleotide composition comprising (a) a CRISPR RNA (crRNA) that includes the gRNA, or (b) a polynucleotide that encodes a crRNA, or (c) a polynucleotide that is processed into a crRNA. In embodiments, the gRNA-containing composition optionally includes an RNA-guided nuclease, or a polynucleotide that encodes the RNA-guided nuclease. In other embodiments, an RNA-guided nuclease or a polynucleotide that encodes the RNA-guided nuclease is provided in a separate step. In some embodiments of the method, a gRNA is provided to a cell (e. g., a plant cell or plant protoplast) that includes an RNA-guided nuclease or a polynucleotide that encodes an RNA-guided nuclease, e. g., an RNA-guided nuclease selected from the group consisting of an RNA-guided DNA endonuclease, a type II Cas nuclease, a Cas9, a type V Cas nuclease, a Cpf1 (Cas12a), a CasY (Cas12d), a CasX (Cas12e), a C2c1, a C2c3, Cas12f, Cas12i, Cas12j, an engineered RNA-guided nuclease, and a codon-optimized RNA-guided nuclease; in an example, the cell (e. g., a plant cell or plant protoplast) stably or transiently expresses the RNA-guided nuclease. In embodiments, the polynucleotide that encodes the RNA-guided nuclease is, for example, DNA that encodes the RNA-guided nuclease and is stably integrated in the genome of a plant cell or plant protoplast, DNA or RNA that encodes the RNA-guided nuclease and is transiently present in or introduced into a plant cell or plant protoplast; such DNA or RNA can be introduced, e. g., by using a vector such as a plasmid or viral vector or as an mRNA, or as vector-less DNA or RNA introduced directly into a plant cell or plant protoplast.

[0106] In embodiments that further include the step of providing to a cell (e. g., a plant cell or plant protoplast) an RNA-guided nuclease or a polynucleotide that encodes the RNA-guided nuclease, the RNA-guided nuclease is provided simultaneously with the gRNA-containing composition, or in a separate step that precedes or follows the step of providing the gRNA-containing composition. In embodiments, the gRNA-containing composition further includes an RNA-guided nuclease or a polynucleotide that encodes the RNA-guided nuclease. In other embodiments, there is provided a separate composition that includes an RNA-guided nuclease or a polynucleotide that encodes the RNA-guided nuclease. In embodiments, the RNA-guided nuclease is provided as a ribonucleoprotein (RNP) complex, e. g., a preassembled RNP that includes the RNA-guided nuclease complexed with a polynucleotide including the gRNA or encoding a gRNA, or a preassembled RNP that includes a polynucleotide that encodes the RNA-guided nuclease (and optionally encodes the gRNA, or is provided with a separate polynucleotide including the gRNA or encoding a gRNA), complexed with a protein. In embodiments, the RNA-guided nuclease is a fusion protein, i. e., wherein the RNA-guided nuclease (e. g., Cas9, a Cpf1 (Cas12a), a CasY (Cas12d), a CasX (Cas12e), a C2c1, a C2c3, Cas12f, Cas12i, or Cas12j,) is covalently bound through a peptide bond to a cell-penetrating peptide, a nuclear localization signal peptide, a chloroplast transit peptide, or a mitochondrial targeting peptide; such fusion proteins are conveniently encoded in a single nucleotide sequence, optionally including codons for linking amino acids. In embodiments, the RNA-guided nuclease or a polynucleotide that encodes the RNA-guided nuclease is provided as a complex with a cell-penetrating peptide or other transfecting agent. In embodiments, the RNA-guided nuclease or a polynucleotide that encodes the RNA-guided nuclease is complexed with, or covalently or non-covalently bound to, a further element, e. g., a carrier molecule, an antibody, an antigen, a viral movement protein, a polymer, a detectable label (e. g., a moiety detectable by fluorescence, radioactivity, or enzymatic or immunochemical reaction), a quantum dot, or a particulate or nanoparticulate. In embodiments, the RNA-guided nuclease or a polynucleotide that encodes the RNA-guided nuclease is provided in a solution, or is provided in a liposome, micelle, emulsion, reverse emulsion, suspension, or other mixed-phase composition.

[0107] An RNA-guided nuclease can be provided to a cell (e. g., a plant cell or plant protoplast) by any suitable technique. In embodiments, the RNA-guided nuclease is provided by directly contacting a plant cell or plant protoplast with the RNA-guided nuclease or the polynucleotide that encodes the RNA-guided nuclease. In embodiments, the RNA-guided nuclease is provided by transporting the RNA-guided nuclease or a polynucleotide that encodes the RNA-guided nuclease into a plant cell or plant protoplast using a chemical, enzymatic, or physical agent as provided in detail in the paragraphs following the heading “Delivery Methods and Delivery Agents”. In embodiments, the RNA-guided nuclease is provided by bacterially mediated (e. g., Agrobacterium sp., Rhizobium sp., Sinorhizobium sp., Mesorhizobium sp., Bradyrhizobium sp., Azobacter sp., Phyllobacterium sp.) transfection of a plant cell or plant protoplast with a polynucleotide encoding the RNA-guided nuclease; see, e. g., Broothaerts et al. (2005) Nature, 433:629-633. In an embodiment, the RNA-guided nuclease is provided by transcription in a plant cell or plant protoplast of a DNA that encodes the RNA-guided nuclease and is stably integrated in the genome of the plant cell or plant protoplast or that is provided to the plant cell or plant protoplast in the form of a plasmid or expression vector (e. g., a viral vector) that encodes the RNA-guided nuclease (and optionally encodes one or more gRNAs, crRNAs, or sgRNAs, or is optionally provided with a separate plasmid or vector that encodes one or more gRNAs, crRNAs, or sgRNAs). In embodiments, the RNA-guided nuclease is provided to the plant cell or plant protoplast as a polynucleotide that encodes the RNA-guided nuclease, e. g., in the form of an mRNA encoding the nuclease.

[0108] Where a polynucleotide is concerned (e. g., a crRNA that includes the gRNA together with a separate tracrRNA, or a crRNA and a tracrRNA encoded on a single polynucleotide or on separate polynucleotides, or at least one polynucleotide that is processed into one or more crRNAs and a tracrRNA, or a sgRNA that includes the gRNA, or a polynucleotide that encodes a sgRNA, or a polynucleotide that is processed into a sgRNA, or a polynucleotide that encodes the RNA-guided nuclease), embodiments of the polynucleotide include: (a) double-stranded RNA; (b) single-stranded RNA; (c) chemically modified RNA; (d) double-stranded DNA; (e) single-stranded DNA; (f) chemically modified DNA; or (g) a combination of (a)-(f). Where expression of a polynucleotide is involved (e. g., expression of a crRNA from a DNA encoding the crRNA, or expression and translation of a RNA-guided nuclease from a DNA encoding the nuclease), in some embodiments it is sufficient that expression be transient, i. e., not necessarily permanent or stable in the cell. Certain embodiments of the polynucleotide further include additional nucleotide sequences that provide useful functionality; non-limiting examples of such additional nucleotide sequences include an aptamer or riboswitch sequence, nucleotide sequence that provides secondary structure such as stem-loops or that provides a sequence-specific site for an enzyme (e. g., a sequence-specific recombinase or endonuclease site), T-DNA (e. g., DNA sequence encoding a gRNA, crRNA, tracrRNA, or sgRNA is enclosed between left and right T-DNA borders from Agrobacterium spp. or from other bacteria that infect or induce tumors in plants), a DNA nuclear-targeting sequence, a regulatory sequence such as a promoter sequence, and a transcript-stabilizing sequence. Certain embodiments of the polynucleotide include those wherein the polynucleotide is complexed with, or covalently or non-covalently bound to, a non-nucleic acid element, e. g., a carrier molecule, an antibody, an antigen, a viral movement protein, a cell-penetrating or pore-forming peptide, a polymer, a detectable label, a quantum dot, or a particulate or nanoparticulate.

[0109] In embodiments, the at least one DSB is introduced into the genome by at least one treatment selected from the group consisting of: (a) bacterially mediated (e. g., Agrobacterium sp., Rhizobium sp., Sinorhizobium sp., Mesorhizobium sp., Bradyrhizobium sp., Azobacter sp., Phyllobacterium sp.) transfection with a DSB-inducing agent; (b) Biolistics or particle bombardment with a DSB-inducing agent; (c) treatment with at least one chemical, enzymatic, or physical agent as provided in detail in the paragraphs following the heading “Delivery Methods and Delivery Agents”; and (d) application of heat or cold, ultrasonication, centrifugation, positive or negative pressure, cell wall or membrane disruption or deformation, or electroporation. It is generally desirable that introduction of the at least one DSB into the genome (i. e., the “editing” of the genome) is achieved with sufficient efficiency and accuracy to ensure practical utility. One measure of efficiency is the percentage or fraction of the population of cells that have been treated with a DSB-inducing agent and in which the DSB is successfully introduced at the correct site in the genome. The efficiency of genome editing is assessed by any suitable method such as a heteroduplex cleavage assay or by sequencing, as described elsewhere in this disclosure. Accuracy is indicated by the absence of, or minimal occurrence of, off-target introduction of a DSB (i. e., at other than the intended site in the genome).

[0110] The location where the at least one DSB is inserted varies according to the desired result, for example whether the intention is to simply disrupt expression of the sequence of interest, or to add functionality (such as placing expression of the sequence of interest under inducible control). Thus, the location of the DSB is not necessarily within or directly adjacent to the sequence of interest. In embodiments, the at least one DSB in a genome is located: (a) within the sequence of interest, (b) upstream of (i. e., 5′ to) the sequence of interest, or (c) downstream of (i. e., 3′ to) the sequence of interest. In embodiments, a sequence encoded by the polynucleotide (such as a double-stranded DNA, a single-stranded DNA, a single-stranded DNA/RNA hybrid, or a double-stranded DNA/RNA hybrid) donor molecule, when integrated into the genome, is functionally or operably linked (e. g., linked in a manner that modifies the transcription or the translation of the sequence of interest or that modifies the stability of a transcript including that of the sequence of interest) to the sequence of interest. In embodiments, a sequence encoded by the polynucleotide donor molecule is integrated at a location 5′ to and operably linked to the sequence of interest, wherein the integration location is selected to provide a specifically modulated (upregulated or downregulated) level of expression of the sequence of interest. For example, a sequence encoded by the polynucleotide donor molecule is integrated at a specific location in the promoter region of a protein-encoding gene that results in a desired expression level of the protein; in an embodiment, the appropriate location is determined empirically by integrating a sequence encoded by the polynucleotide donor molecule at about 50, about 100, about 150, about 200, about 250, about 300, about 350, about 400, about 450, and about 500 nucleotides 5′ to (upstream of) the start codon of the coding sequence, and observing the relative expression levels of the protein for each integration location.

[0111] In embodiments, the donor polynucleotide sequence of interest includes coding (protein-coding) sequence, non-coding (non-protein-coding) sequence, or a combination of coding and non-coding sequence. Embodiments include a plant nuclear sequence, a plant plastid sequence, a plant mitochondrial sequence, a sequence of a symbiont, pest, or pathogen of a plant, and combinations thereof. Embodiments include exons, introns, regulatory sequences including promoters, other 5′ elements and 3′ elements, and genomic loci encoding non-coding RNAs including long non-coding RNAs (lncRNAs), microRNAs (miRNAs), and trans-acting siRNAs (ta-siRNAs). In embodiments, multiple sequences are altered, for example, by delivery of multiple gRNAs to the plant cell or plant protoplast; the multiple sequences can be part of the same gene (e. g., different locations in a single coding region or in different exons or introns of a protein-coding gene) or different genes. In embodiments, the sequence of an endogenous genomic locus is altered to delete, add, or modify a functional non-coding sequence; in non-limiting examples, such functional non-coding sequences include, e. g., a miRNA, siRNA, or ta-siRNA recognition or cleavage site, a splice site, a recombinase recognition site, a transcription factor binding site, or a transcriptional or translational enhancer or repressor sequence.

[0112] In embodiments, the disclosure provides a method of changing expression of a sequence of interest in a genome, including integrating a sequence encoded by a polynucleotide (such as a double-stranded DNA, a single-stranded DNA, a single-stranded DNA/RNA hybrid, or a double-stranded DNA/RNA hybrid) donor molecule at the site of two or more DSBs in a genome. In embodiments, the sequence of the polynucleotide donor molecule that is integrated into each of the two or more DSBs is (a) identical, or (b) different, for each of the DSBs. In embodiments, the change in expression of a sequence of interest in genome is manifested as the expression of an altered or edited sequence of interest; in non-limiting examples, the method is used to integrate sequence-specific recombinase recognition site sequences at two DSBs in a genome, whereby, in the presence of the corresponding site-specific DNA recombinase, the genomic sequence flanked on either side by the integrated recombinase recognition sites is excised from the genome (or in some instances is inverted); such an approach is useful, e. g., for deletion of larger lengths of genomic sequence, for example, deletion of all or part of an exon or of one or more protein domains. In other embodiments, at least two DSBs are introduced into a genome by one or more nucleases in such a way that genomic sequence is deleted between the DSBs (leaving a deletion with blunt ends, overhangs or a combination of a blunt end and an overhang), and a sequence encoded by at least one polynucleotide donor molecule is integrated between the DSBs (i. e., a sequence encoded by at least one individual polynucleotide donor molecule is integrated at the location of the deleted genomic sequence), wherein the genomic sequence that is deleted is coding sequence, non-coding sequence, or a combination of coding and non-coding sequence; such embodiments provide the advantage of not requiring a specific PAM site at or very near the location of a region wherein a nucleotide sequence change is desired. In an embodiment, at least two DSBs are introduced into a genome by one or more nucleases in such a way that genomic sequence is deleted between the DSBs (leaving a deletion with blunt ends, overhangs or a combination of a blunt end and an overhang), and at least one sequence encoded by a polynucleotide donor molecule is integrated between the DSBs (i. e., at least one individual sequence encoded by a polynucleotide donor molecule is integrated at the location of the deleted genomic sequence). In an embodiment, two DSBs are introduced into a genome, resulting in excision or deletion of genomic sequence between the sites of the two DSBs, and a sequence encoded by a polynucleotide donor molecule integrated into the genome at the location of the deleted genomic sequence (that is, a sequence encoded by an individual polynucleotide donor molecule is integrated between the two DSBs). Generally, the polynucleotide donor molecule with the sequence to be integrated into the genome is selected in terms of the presence or absence of terminal overhangs to match the type of DSBs introduced. In an embodiment, two blunt-ended DSBs are introduced into a genome, resulting in excision or deletion of genomic sequence between the sites of the two blunt-ended DSBs, and a sequence encoded by a blunt-ended double-stranded DNA or blunt-ended double-stranded DNA/RNA hybrid or a single-stranded DNA or a single-stranded DNA/RNA hybrid donor molecule is integrated into the genome between the two blunt-ended DSBs. In another embodiment, two DSBs are introduced into a genome, wherein the first DSB is blunt-ended and the second DSB has an overhang, resulting in deletion of genomic sequence between the two DSBs, and a sequence encoded by a double-stranded DNA or double-stranded DNA/RNA hybrid donor molecule that is blunt-ended at one terminus and that has an overhang on the other terminus (or, alternatively, a single-stranded DNA or a single-stranded DNA/RNA hybrid molecule) is integrated into the genome between the two DSBs; in an alternative embodiment, two DSBs are introduced into a genome, wherein both DSBs have overhangs but of different overhang lengths (different number of unpaired nucleotides), resulting in deletion of genomic sequence between the two DSBs, and a sequence encoded by a double-stranded DNA or double-stranded DNA/RNA hybrid donor molecule that has overhangs at each terminus, wherein the overhangs are of unequal lengths (or, alternatively, a single-stranded DNA or a single-stranded DNA/RNA hybrid donor molecule), is integrated into the genome between the two DSBs; embodiments with such DSB asymmetry (i. e., a combination of DSBs having a blunt end and an overhang, or a combination of DSBs having overhangs of unequal lengths) provide the opportunity for controlling directionality or orientation of the inserted polynucleotide, e. g., by selecting a double-stranded DNA or double-stranded DNA/RNA hybrid donor molecule having one blunt end and one terminus with unpaired nucleotides, such that the polynucleotide is integrated preferably in one orientations. In another embodiment, two DSBs, each having an overhang, are introduced into a genome, resulting in excision or deletion of genomic sequence between the sites of the two DSBs, and a sequence encoded by a double-stranded DNA or double-stranded DNA/RNA hybrid donor molecule that has an overhang at each terminus (or, alternatively, a single-stranded DNA or a single-stranded DNA/RNA hybrid donor molecule) is integrated into the genome between the two DSBs. The length of genomic sequence that is deleted between two DSBs and the length of a sequence encoded by the polynucleotide donor molecule that is integrated in place of the deleted genomic sequence can be, but need not be equal. In embodiments, the distance between any two DSBs (or the length of the genomic sequence that is to be deleted) is at least 10, at least 15, at least 20, at least 25, at least 30, at least 40, at least 50, at least 60, at least 70, at least 80, or at least 100 nucleotides; in other embodiments the distance between any two DSBs (or the length of the genomic sequence that is to be deleted) is at least 100, at least 150, at least 200, at least 300, at least 400, at least 500, at least 600, at least 750, or at least 1000 nucleotides. In embodiments where more than two DSBs are introduced into genomic sequence, it is possible to effect different deletions of genomic sequence (for example, where three DSBs are introduced, genomic sequence can be deleted between the first and second DSBs, between the first and third DSBs, and between the second and third DSBs). In some embodiments, a sequence encoded by more than one polynucleotide donor molecule (e. g., multiple copies of a sequence encoded by a polynucleotide donor molecule having a given sequence, or multiple sequences encoded by polynucleotide donor molecules with two or more different sequences) is integrated into the genome. For example, different sequences encoded by individual polynucleotide donor molecules can be individually integrated at a single locus where genomic sequence has been deleted between two DSBs, or at multiple locations where genomic sequence has been deleted (e. g., where more than two DSBs have been introduced into the genome). In embodiments, at least one exon is replaced by integrating a sequence encoded by at least one polynucleotide molecule where genomic sequence is deleted between DSBs that were introduced by at least one sequence-specific nuclease into intronic sequence flanking the at least one exon; an advantage of this approach over an otherwise similar method (i. e., differing by having the DSBs introduced into coding sequence instead of intronic sequence) is the avoidance of inaccuracies (nucleotide changes, deletions, or additions at the nuclease cleavage sites) in the resulting exon sequence or messenger RNA.

[0113] In embodiments, the methods described herein are used to delete or replace genomic sequence, which can be a relatively large sequence (e. g., all or part of at least one exon or of a protein domain) resulting in the equivalent of an alternatively spliced transcript. Additional related aspects include compositions and reaction mixtures including a plant cell or a plant protoplast and at least two guide RNAs, wherein each guide RNA is designed to effect a DSB in intronic sequence flanking at least one exon; such compositions and reaction mixtures optionally include at least one sequence-specific nuclease capable of being guided by at least one of the guide RNAs to effect a DSB in genomic sequence, and optionally include a polynucleotide donor molecule that is capable of being integrated (or having its sequence integrated) into the genome at the location of at least one DSB or at the location of genomic sequence that is deleted between the DSBs.

[0114] Donor Polynucleotide Molecules: Embodiments of the polynucleotide donor molecule having a sequence that is integrated at the site of at least one double-strand break (DSB) in a genome include double-stranded DNA, a single-stranded DNA, a single-stranded DNA/RNA hybrid, and a double-stranded DNA/RNA hybrid. In embodiments, a polynucleotide donor molecule that is a double-stranded (e. g., a dsDNA or dsDNA/RNA hybrid) molecule is provided directly to the plant protoplast or plant cell in the form of a double-stranded DNA or a double-stranded DNA/RNA hybrid, or as two single-stranded DNA (ssDNA) molecules that are capable of hybridizing to form dsDNA, or as a single-stranded DNA molecule and a single-stranded RNA (ssRNA) molecule that are capable of hybridizing to form a double-stranded DNA/RNA hybrid; that is to say, the double-stranded polynucleotide molecule is not provided indirectly, for example, by expression in the cell of a dsDNA encoded by a plasmid or other vector. In various non-limiting embodiments of the method, the polynucleotide donor molecule that is integrated (or that has a sequence that is integrated) at the site of at least one double-strand break (DSB) in a genome is double-stranded and blunt-ended; in other embodiments the polynucleotide donor molecule is double-stranded and has an overhang or “sticky end” consisting of unpaired nucleotides (e. g., 1, 2, 3, 4, 5, or 6 unpaired nucleotides) at one terminus or both termini. In an embodiment, the DSB in the genome has no unpaired nucleotides at the cleavage site, and the polynucleotide donor molecule that is integrated (or that has a sequence that is integrated) at the site of the DSB is a blunt-ended double-stranded DNA or blunt-ended double-stranded DNA/RNA hybrid molecule, or alternatively is a single-stranded DNA or a single-stranded DNA/RNA hybrid molecule. In another embodiment, the DSB in the genome has one or more unpaired nucleotides at one or both sides of the cleavage site, and the polynucleotide donor molecule that is integrated (or that has a sequence that is integrated) at the site of the DSB is a double-stranded DNA or double-stranded DNA/RNA hybrid molecule with an overhang or “sticky end” consisting of unpaired nucleotides at one or both termini, or alternatively is a single-stranded DNA or a single-stranded DNA/RNA hybrid molecule; in embodiments, the polynucleotide donor molecule DSB is a double-stranded DNA or double-stranded DNA/RNA hybrid molecule that includes an overhang at one or at both termini, wherein the overhang consists of the same number of unpaired nucleotides as the number of unpaired nucleotides created at the site of a DSB by a nuclease that cuts in an off-set fashion (e. g., where a Cpf1 nuclease effects an off-set DSB with 5-nucleotide overhangs in the genomic sequence, the polynucleotide donor molecule that is to be integrated (or that has a sequence that is to be integrated) at the site of the DSB is double-stranded and has 5 unpaired nucleotides at one or both termini). Generally, one or both termini of the polynucleotide donor molecule contain no regions of sequence homology (identity or complementarity) to genomic regions flanking the DSB; that is to say, one or both termini of the polynucleotide donor molecule contain no regions of sequence that is sufficiently complementary to permit hybridization to genomic regions immediately adjacent to the location of the DSB. In embodiments, the polynucleotide donor molecule contains no homology to the locus of the DSB, that is to say, the polynucleotide donor molecule contains no nucleotide sequence that is sufficiently complementary to permit hybridization to genomic regions immediately adjacent to the location of the DSB. In an embodiment, the polynucleotide donor molecule that is integrated at the site of at least one double-strand break (DSB) includes between 2-20 nucleotides in one (if single-stranded) or in both strands (if double-stranded), e. g., 2, 3, 4, 5, 6, 7, 8, 9, 10, 11, 12, 13, 14, 15, 16, 17, 18, 19, or 20 nucleotides on one or on both strands, each of which can be base-paired to a nucleotide on the opposite strand (in the case of a perfectly base-paired double-stranded polynucleotide molecule). In embodiments, the polynucleotide donor molecule is at least partially double-stranded and includes 2-20 base-pairs, e. g., 2, 3, 4, 5, 6, 7, 8, 9, 10, 11, 12, 13, 14, 15, 16, 17, 18, 19, or 20 base-pairs; in embodiments, the polynucleotide donor molecule is double-stranded and blunt-ended and consists of 2-20 base-pairs, e. g., 2, 3, 4, 5, 6, 7, 8, 9, 10, 11, 12, 13, 14, 15, 16, 17, 18, 19, or 20 base-pairs; in other embodiments, the polynucleotide donor molecule is double-stranded and includes 2-20 base-pairs, e. g., 2, 3, 4, 5, 6, 7, 8, 9, 10, 11, 12, 13, 14, 15, 16, 17, 18, 19, or 20 base-pairs and in addition has at least one overhang or “sticky end” consisting of at least one additional, unpaired nucleotide at one or at both termini. Non-limiting examples of such relatively small polynucleotide donor molecules of 20 or fewer base-pairs (if double-stranded) or 20 or fewer nucleotides (if single-stranded) include polynucleotide donor molecules that have at least one strand including a transcription factor recognition site sequence (e. g., such as the sequences of transcription factor recognition sites provided in the working Examples), or that have at least one strand including a small RNA recognition site, or that have at least one strand including a recombinase recognition site. In an embodiment, the polynucleotide donor molecule that is integrated (or that has a sequence that is integrated) at the site of at least one double-strand break (DSB) in a genome is a blunt-ended double-stranded DNA or a blunt-ended double-stranded DNA/RNA hybrid molecule of about 18 to about 300 base-pairs, or about 20 to about 200 base-pairs, or about 30 to about 100 base-pairs, and having at least one phosphorothioate bond between adjacent nucleotides at a 5′ end, 3′ end, or both 5′ and 3′ ends. In embodiments, the polynucleotide donor molecule includes single strands of at least 11, at least 18, at least 20, at least 30, at least 40, at least 60, at least 80, at least 100, at least 120, at least 140, at least 160, at least 180, at least 200, at least 240, at about 280, or at least 320 nucleotides. In embodiments, the polynucleotide donor molecule has a length of at least 2, at least 3, at least 4, at least 5, at least 6, at least 7, at least 8, at least 9, at least 10, or at least 11 base-pairs if double-stranded (or nucleotides if single-stranded), or between about 2 to about 320 base-pairs if double-stranded (or nucleotides if single-stranded), or between about 2 to about 500 base-pairs if double-stranded (or nucleotides if single-stranded), or between about 5 to about 500 base-pairs if double-stranded (or nucleotides if single-stranded), or between about 5 to about 300 base-pairs if double-stranded (or nucleotides if single-stranded), or between about 11 to about 300 base-pairs if double-stranded (or nucleotides if single-stranded), or about 18 to about 300 base-pairs if double-stranded (or nucleotides if single-stranded), or between about 30 to about 100 base-pairs if double-stranded (or nucleotides if single-stranded). In embodiments, the polynucleotide donor molecule includes chemically modified nucleotides (see, e. g., the various modifications of internucleotide linkages, bases, and sugars described in Verma and Eckstein (1998) Annu. Rev. Biochem., 67:99-134); in embodiments, the naturally occurring phosphodiester backbone of the polynucleotide donor molecule is partially or completely modified with phosphorothioate, phosphorodithioate, or methylphosphonate internucleotide linkage modifications, or the polynucleotide donor molecule includes modified nucleoside bases or modified sugars, or the polynucleotide donor molecule is labelled with a fluorescent moiety (e. g., fluorescein or rhodamine or a fluorescent nucleoside analogue) or other detectable label (e. g., biotin or an isotope). In an embodiment, the polynucleotide donor molecule is double-stranded and perfectly base-paired through all or most of its length, with the possible exception of any unpaired nucleotides at either terminus or both termini. In another embodiment, the polynucleotide donor molecule is double-stranded and includes one or more non-terminal mismatches or non-terminal unpaired nucleotides within the otherwise double-stranded duplex. In another embodiment, the polynucleotide donor molecule contains secondary structure that provides stability or acts as an aptamer. Other related embodiments include double-stranded DNA/RNA hybrid molecules, single-stranded DNA/RNA hybrid donor molecules, and single-stranded DNA donor molecules (including single-stranded, chemically modified DNA donor molecules), which in analogous procedures are integrated (or have a sequence that is integrated) at the site of a double-strand break.

[0115] In embodiments of the method, the polynucleotide (such as a double-stranded DNA, a single-stranded DNA, a single-stranded DNA/RNA hybrid, or a double-stranded DNA/RNA hybrid) donor molecule that is integrated at the site of at least one double-strand break (DSB) in a genome includes nucleotide sequence(s) on one or on both strands that provide a desired functionality when the polynucleotide is integrated into the genome. In various non-limiting embodiments of the method, the sequence encoded by a donor polynucleotide that is inserted at the site of at least one double-strand break (DSB) in a genome includes at least one sequence selected from the group consisting of:
[0116] (a) DNA encoding at least one stop codon, or at least one stop codon on each strand, or at least one stop codon within each reading frame on each strand;
[0117] (b) DNA encoding heterologous primer sequence (e. g., a sequence of about 18 to about 22 contiguous nucleotides, or of at least 18 contiguous nucleotides, that can be used to initiate DNA polymerase activity at the site of the DSB);
[0118] (c) DNA encoding a unique identifier sequence (e. g., a sequence that when inserted at the DSB creates a heterologous sequence that can be used to identify the presence of the insertion);
[0119] (d) DNA encoding a transcript-stabilizing sequence;
[0120] (e) DNA encoding a transcript-destabilizing sequence;
[0121] (f) a DNA aptamer or DNA encoding an RNA aptamer or amino acid aptamer; and
[0122] (g) DNA that includes or encodes a sequence recognizable by a specific binding agent.

[0123] In an embodiment, the sequence encoded by the polynucleotide (such as a double-stranded DNA, a single-stranded DNA, a single-stranded DNA/RNA hybrid, or a double-stranded DNA/RNA hybrid) donor molecule that is integrated at the site of at least one double-strand break (DSB) in a genome includes DNA encoding at least one stop codon, or at least one stop codon on each strand, or at least one stop codon within each reading frame on each strand. Such sequence encoded by a polynucleotide donor molecule, when integrated at a DSB in a genome can be useful for disrupting the expression of a sequence of interest, such as a protein-coding gene. An example of such a polynucleotide donor molecule is a double-stranded DNA, a single-stranded DNA, a single-stranded DNA/RNA hybrid, or a double-stranded DNA/RNA hybrid donor molecule, of at least 18 contiguous base-pairs if double-stranded or at least 11 contiguous nucleotides if single-stranded, and encoding at least one stop codon in each possible reading frame on either strand. Another example of such a polynucleotide donor molecule is a double-stranded DNA or double-stranded DNA/RNA hybrid donor molecule wherein each strand includes at least 18 and fewer than 200 contiguous base-pairs, wherein the number of base-pairs is not divisible by 3, and wherein each strand encodes at least one stop codon in each possible reading frame in the 5′ to 3′ direction. Another example of such a polynucleotide donor molecule is a single-stranded DNA or single-stranded DNA/RNA hybrid donor molecule wherein each strand includes at least 11 and fewer than about 300 contiguous nucleotides, wherein the number of base-pairs is not divisible by 3, and wherein the polynucleotide donor molecule encodes at least one stop codon in each possible reading frame in the 5′ to 3′ direction.

[0124] In an embodiment, the polynucleotide (such as a double-stranded DNA, a single-stranded DNA, a single-stranded DNA/RNA hybrid, or a double-stranded DNA/RNA hybrid) donor molecule that is integrated (or that has a sequence that is integrated) at the site of at least one double-strand break (DSB) in a genome includes DNA encoding heterologous primer sequence (e. g., a sequence of about 18 to about 22 contiguous nucleotides, or of at least 18, at least 20, or at least 22 contiguous nucleotides that can be used to initiate DNA polymerase activity at the site of the DSB). Heterologous primer sequence can further include nucleotides of the genomic sequence directly flanking the site of the DSB.

[0125] In an embodiment, the polynucleotide (such as a double-stranded DNA, a single-stranded DNA, a single-stranded DNA/RNA hybrid, or a double-stranded DNA/RNA hybrid) donor molecule that is integrated (or that has a sequence that is integrated) at the site of at least one double-strand break (DSB) in a genome includes nucleotides encoding a unique identifier sequence (e. g., a sequence that when inserted at the DSB creates a heterologous sequence that can be used to identify the presence of the insertion)

[0126] In an embodiment, the polynucleotide (such as a double-stranded DNA, a single-stranded DNA, a single-stranded DNA/RNA hybrid, or a double-stranded DNA/RNA hybrid) donor molecule that is integrated (or that has a sequence that is integrated) at the site of at least one double-strand break (DSB) in a genome includes nucleotides encoding a transcript-stabilizing sequence. In an example, sequence of a double-stranded or single-stranded DNA or a DNA/RNA hybrid donor molecule encoding a 5′ terminal RNA-stabilizing stem-loop (see, e. g., Suay (2005) Nucleic Acids Rev., 33:4754-4761) is integrated at a DSB located 5′ to the sequence for which improved transcript stability is desired. In another embodiment, the polynucleotide donor molecule that is integrated (or that has a sequence that is integrated) at the site of at least one double-strand break (DSB) in a genome includes nucleotides encoding a transcript-destabilizing sequence such as the SAUR destabilizing sequences described in detail in U. S. Patent Application Publication 2007/0011761, incorporated herein by reference.

[0127] In an embodiment, the polynucleotide (such as a double-stranded DNA, a single-stranded DNA, a single-stranded DNA/RNA hybrid, or a double-stranded DNA/RNA hybrid) donor molecule that is integrated (or that has a sequence that is integrated) at the site of at least one double-strand break (DSB) in a genome includes a DNA aptamer or DNA encoding an RNA aptamer or amino acid aptamer. Nucleic acid (DNA or RNA) aptamers are single- or double-stranded nucleotides that bind specifically to molecules or ligands which include small molecules (e. g., secondary metabolites such as alkaloids, terpenes, flavonoids, and other small molecules, as well as larger molecules such as polyketides and non-ribosomal proteins), proteins, other nucleic acid molecules, and inorganic compounds. Introducing an aptamer at a specific location in the genome is useful, e. g., for adding binding specificity to an enzyme or for placing expression of a transcript or activity of an encoded protein under ligand-specific control. In an example, the polynucleotide donor molecule encodes a poly-histidine “tag” which is integrated at a DSB downstream of a protein or protein subunit, enabling the protein expressed from the resulting transcript to be purified by affinity to nickel, e. g., on nickel resins; in an embodiments, the polynucleotide donor molecule encodes a 6×-His tag, a 10×-His tag, or a 10×-His tag including one or more stop codons following the histidine-encoding codons, where the last is particularly useful when integrated downstream of a protein or protein subunit lacking a stop codon (see, e. g., parts[dot]igem[dot]org/Part:BBa_K844000). In embodiments, the polynucleotide donor molecule encodes a riboswitch, wherein the riboswitch includes both an aptamer which changes its conformation in the presence or absence of a specific ligand, and an expression-controlling region that turns expression on or off, depending on the conformation of the aptamer. See, for example, the regulatory RNA molecules containing ligand-specific aptamers described in U. S. Patent Application Publication 2013/0102651 and the various riboswitches described in U. S. Patent Application Publication 2005/0053951, both of which publications are incorporated herein by reference.

[0128] In an embodiment, the polynucleotide (such as a double-stranded DNA, a single-stranded DNA, a single-stranded DNA/RNA hybrid, or a double-stranded DNA/RNA hybrid) donor molecule that is integrated (or that has a sequence that is integrated) at the site of at least one double-strand break (DSB) in a genome includes nucleotides that include or encode a sequence recognizable by (i. e., binds to) a specific binding agent. Non-limiting embodiments of specific binding agents include nucleic acids, peptides or proteins, non-peptide/non-nucleic acid ligands, inorganic molecules, and combinations thereof; specific binding agents also include macromolecular assemblages such as lipid bilayers, cell components or organelles, and even intact cells or organisms. In embodiments, the specific binding agent is an aptamer or riboswitch, or alternatively is recognized by an aptamer or a riboswitch. In an embodiment, the disclosure provides a method of changing expression of a sequence of interest in a genome, comprising integrating a polynucleotide molecule at the site of a DSB in a genome, wherein the polynucleotide donor molecule includes a sequence recognizable by a specific binding agent, wherein the integrated sequence encoded by the polynucleotide donor molecule is functionally or operably linked to a sequence of interest, and wherein contacting the integrated sequence encoded by the polynucleotide donor molecule with the specific binding agent results in a change of expression of the sequence of interest; in embodiments, sequences encoded by different polynucleotide donor molecules are integrated at multiple DSBs in a genome.

[0129] In an embodiment, the polynucleotide (such as a double-stranded DNA, a single-stranded DNA, a single-stranded DNA/RNA hybrid, or a double-stranded DNA/RNA hybrid) donor molecule that is integrated (or that has a sequence that is integrated) at the site of at least one double-strand break (DSB) in a genome includes nucleotides that include or encode a sequence recognizable by (i. e., binds to) a specific binding agent, wherein:
[0130] (a) the sequence recognizable by a specific binding agent includes an auxin response element (AuxRE) sequence, the specific binding agent is an auxin-responsive transcription factor, and the change of expression is upregulation; see, e. g., Walker and Estelle (1998) Curr. Opinion Plant Biol., 1:434-439;
[0131] (b) the sequence recognizable by a specific binding agent includes at least one D1-4 sequence (CCTCGTGTCTC, SEQ ID NO:328; see Ulmasov et al. (1997) Plant Cell, 9:1963-1971), the specific binding agent is an auxin-responsive transcription factor, and the change of expression is upregulation;
[0132] (c) the sequence recognizable by a specific binding agent includes at least one DR5 sequence (CCTTTTGTCTC, SEQ ID NO:329; see Ulmasov et al. (1997) Plant Cell, 9:1963-1971), the specific binding agent is an auxin-responsive transcription factor, and the change of expression is upregulation;
[0133] (d) the sequence recognizable by a specific binding agent includes at least one m5-DR5 sequence (CCTTTTGTCNC, wherein N is A, C, or G, SEQ ID NO:330; see Ulmasov et al. (1997) Plant Cell, 9:1963-1971), the specific binding agent is an auxin-responsive transcription factor, and the change of expression is upregulation;
[0134] (e) the sequence recognizable by a specific binding agent includes at least one P3 sequence (TGTCTC, SEQ ID NO:331), the specific binding agent is an auxin-responsive transcription factor, and the change of expression is upregulation;
[0135] (f) the sequence recognizable by a specific binding agent includes a small RNA recognition site sequence, the specific binding agent is the corresponding small RNA (e. g., an siRNA, a microRNA (miRNA), a trans-acting siRNA as described in U.S. Pat. No. 8,030,473, or a phased sRNA as described in U.S. Pat. No. 8,404,928; both of these cited patents are incorporated by reference herein), and the change of expression is downregulation (non-limiting examples are given below, under the heading “Small RNAs”);
[0136] (g) the sequence recognizable by a specific binding agent includes a microRNA (miRNA) recognition site sequence, the specific binding agent is the corresponding mature miRNA, and the change of expression is downregulation (non-limiting examples are given below, under the heading “Small RNAs”);
[0137] (h) the sequence recognizable by a specific binding agent includes a microRNA (miRNA) recognition sequence for an engineered miRNA, the specific binding agent is the corresponding engineered mature miRNA, and the change of expression is downregulation;
[0138] (i) the sequence recognizable by a specific binding agent includes a transposon recognition sequence, the specific binding agent is the corresponding transposon, and the change of expression is upregulation or downregulation;
[0139] (j) the sequence recognizable by a specific binding agent includes an ethylene-responsive element binding-factor-associated amphiphilic repression (EAR) motif (LxLxL, SEQ ID NO:332 or DLNxxP, SEQ ID NO:333) sequence (see, e. g., Ragale and Rozwadowski (2011) Epigenetics, 6:141-146), the specific binding agent is ERF (ethylene-responsive element binding factor) or co-repressor (e. g., TOPLESS (TPL)), and the change of expression is downregulation;
[0140] (k) the sequence recognizable by a specific binding agent includes a splice site sequence (e. g., a donor site, a branching site, or an acceptor site; see, for example, the splice sites and splicing signals publicly available at the ERIS database, lemur[dot]amu[dot]edu[dot]pl/share/ERISdb/home.html), the specific binding agent is a spliceosome, and the change of expression is expression of an alternatively spliced transcript (in some cases, this can include deletion of a relatively large genomic sequence, such as deletion of all or part of an exon or of a protein domain);
[0141] (l) the sequence recognizable by a specific binding agent includes a recombinase recognition site sequence that is recognized by a site-specific recombinase, the specific binding agent is the corresponding site-specific recombinase, and the change of expression is upregulation or downregulation or expression of a transcript having an altered sequence (for example, expression of a transcript that has had a region of DNA excised by the recombinase) (non-limiting examples are given below, under the heading “Recombinases and Recombinase Recognition Sites”);
[0142] (m) the sequence recognizable by a specific binding agent includes sequence encoding an RNA or amino acid aptamer or an RNA riboswitch, the specific binding agent is the corresponding ligand, and the change in expression is upregulation or downregulation;
[0143] (n) the sequence recognizable by a specific binding agent is a hormone responsive element (e. g., a nuclear receptor, or a hormone-binding domain thereof), the specific binding agent is a hormone, and the change in expression is upregulation or downregulation;
[0144] (o) the sequence recognizable by a specific binding agent is a transcription factor binding sequence, the specific binding agent is the corresponding transcription factor, and the change in expression is upregulation or downregulation (non-limiting examples are given below, under the heading “Transcription Factors”); or
[0145] (p) the sequence recognizable by a specific binding agent is a transcription factor binding sequence comprising the sequence GTAAGCGCTTACGTAAGCGCTTACGTAAGCGCTTAC set forth in SEQ ID NO:1030, the specific binding agent is the corresponding transcription factor, and the change in expression is upregulation.

[0146] In embodiments, the polynucleotide (such as a double-stranded DNA, a single-stranded DNA, a single-stranded DNA/RNA hybrid, or a double-stranded DNA/RNA hybrid) donor molecule that is integrated (or that has a sequence that is integrated) at the site of at least one double-strand break (DSB) in a genome includes a nucleotide sequence that encodes an RNA molecule or an amino acid sequence that is recognizable by a specific binding agent. In embodiments, the polynucleotide donor molecule includes a nucleotide sequence that binds specifically to a ligand or that encodes an RNA molecule or an amino acid sequence that binds specifically to a ligand. In embodiments, the polynucleotide donor molecule encodes at least one stop codon on each strand, or encodes at least one stop codon within each reading frame on each strand.

[0147] In embodiments, the polynucleotide (such as a double-stranded DNA, a single-stranded DNA, a single-stranded DNA/RNA hybrid, or a double-stranded DNA/RNA hybrid) donor molecule includes at least partially self-complementary sequence, such that the polynucleotide donor molecule encodes a transcript that is capable of forming at least partially double-stranded RNA. In embodiments, the at least partially double-stranded RNA is capable of forming secondary structure containing at least one stem-loop (i. e., a substantially or perfectly double-stranded RNA “stem” region and a single-stranded RNA “loop” connecting opposite strands of the dsRNA stem. In embodiments, the at least partially double-stranded RNA is cleavable by a Dicer or other ribonuclease. In embodiments, the at least partially double-stranded RNA includes an aptamer or a riboswitch; see, e. g., the RNA aptamers described in U.S. Patent Application Publication 2013/0102651, which is incorporated herein by reference.

[0148] In embodiments, the polynucleotide (such as a double-stranded DNA, a single-stranded DNA, a single-stranded DNA/RNA hybrid, or a double-stranded DNA/RNA hybrid) donor molecule that is integrated (or that has a sequence that is integrated) at the site of at least one double-strand break (DSB) in a genome includes or encodes a nucleotide sequence that is responsive to a specific change in the physical environment (e. g., a change in light intensity or quality, a change in temperature, a change in pressure, a change in osmotic concentration, a change in day length, or addition or removal of a ligand or specific binding agent), wherein exposing the integrated polynucleotide sequence to the specific change in the physical environment results in a change of expression of the sequence of interest. In embodiments, the polynucleotide donor molecule includes a nucleotide sequence encoding an RNA molecule or an amino acid sequence that is responsive to a specific change in the physical environment. In a non-limiting example, the polynucleotide donor molecule encodes an amino acid sequence that is responsive to light, oxygen, redox status, or voltage, such as a Light-Oxygen-Voltage (LOV) domain (see, e. g., Peter et al. (2010) Nature Communications, doi:10.1038/ncomms1121) or a PAS domain (see, e. g., Taylor and Zhulin (1999) Microbiol. Mol. Biol. Reviews, 63:479-506), proteins containing such domains, or sub-domains or motifs thereof (see, e. g., the photochemically active 36-residue N-terminal truncation of the VVD protein described by Zoltowski et al. (2007) Science, 316:1054-1057). In a non-limiting embodiment, integration of a LOV domain at the site of a DSB within or adjacent to a protein-coding region is used to create a heterologous fusion protein that can be photo-activated.

[0149] Small RNAs: In an embodiment, the polynucleotide (such as a double-stranded DNA, a single-stranded DNA, a single-stranded DNA/RNA hybrid, or a double-stranded DNA/RNA hybrid) donor molecule that is integrated (or that has a sequence that is integrated) at the site of at least one double-strand break (DSB) in a genome includes DNA that includes or encodes a small RNA recognition site sequence that is recognized by a corresponding mature small RNA. Small RNAs include siRNAs, microRNAs (miRNAs), trans-acting siRNAs (ta-siRNAs) as described in U.S. Pat. No. 8,030,473, and phased small RNAs (phased sRNAs) as described in U.S. Pat. No. 8,404,928. All mature small RNAs are single-stranded RNA molecules, generally between about 18 to about 26 nucleotides in length, which are produced from longer, completely or substantially double-stranded RNA (dsRNA) precursors. For example, siRNAs are generally processed from perfectly or near-perfectly double-stranded RNA precursors, whereas both miRNAs and phased sRNAs are processed from larger precursors that contain at least some mismatched (non-base-paired) nucleotides and often substantial secondary structure such as loops and bulges in the otherwise largely double-stranded RNA precursor. Precursor molecules include naturally occurring precursors, which are often expressed in a specific (e. g., cell- or tissue-specific, temporally specific, developmentally specific, or inducible) expression pattern. Precursor molecules also include engineered precursor molecules, designed to produce small RNAs (e. g., artificial or engineered siRNAs or miRNAs) that target specific sequences; see, e. g., U.S. Pat. Nos. 7,691,995 and 7,786,350, which are incorporated herein by reference in their entirety. Thus, in embodiments, the polynucleotide (such as a double-stranded DNA, a single-stranded DNA, a single-stranded DNA/RNA hybrid, or a double-stranded DNA/RNA hybrid) donor molecule that is integrated (or that has a sequence that is integrated) at the site of at least one double-strand break (DSB) in a genome includes DNA that includes or encodes a small RNA precursor sequence designed to be processed in vivo to at least one corresponding mature small RNA. In embodiments, the polynucleotide donor molecule that is integrated (or that has a sequence that is integrated) at the site of at least one double-strand break (DSB) in a genome includes DNA that includes or encodes an engineered small RNA precursor sequence that is based on a naturally occurring “scaffold” precursor sequence but wherein the nucleotides of the encoded mature small RNA are designed to target a specific gene of interest that is different from the gene targeted by the natively encoded small RNA; in embodiments, the “scaffold” precursor sequence is one identified from the genome of a plant or a pest or pathogen of a plant; see, e. g., U.S. Pat. No. 8,410,334, which discloses transgenic expression of engineered invertebrate miRNA precursors in a plant, and which is incorporated herein by reference in its entirety.

[0150] Regardless of the pathway that generates the mature small RNA, the mechanism of action is generally similar; the mature small RNA binds in a sequence-specific manner to a small RNA recognition site located on an RNA molecule (such as a transcript or messenger RNA), and the resulting duplex is cleaved by a ribonuclease. The integration of a recognition site for a small RNA at the site of a DSB results in cleavage of the transcript including the integrated recognition site when and where the mature small RNA is expressed and available to bind to the recognition site. For example, a recognition site sequence for a mature siRNA or miRNA that is endogenously expressed only in male reproductive tissue of a plant can be integrated into a DSB, whereby a transcript containing the recognition site sequence is cleaved only where the mature siRNA or miRNA is expressed (i. e., in male reproductive tissue); this is useful, e. g., to prevent expression of a protein in male reproductive tissue such as pollen, and can be used in applications such as to induce male sterility in a plant or to prevent pollen development or shedding. Similarly, a recognition site sequence for a mature siRNA or miRNA that is endogenously expressed only in the roots of a plant can be integrated into a DSB, whereby a transcript containing the recognition site sequence is cleaved only in roots; this is useful, e. g., to prevent expression of a protein in roots. Non-limiting examples of useful small RNAs include: miRNAs having tissue-specific expression patterns disclosed in U.S. Pat. No. 8,334,430, miRNAs having temporally specific expression patterns disclosed in U.S. Pat. No. 8,314,290, miRNAs with stress-responsive expression patterns disclosed in U.S. Pat. No. 8,237,017, siRNAs having tissue-specific expression patterns disclosed in U.S. Pat. No. 9,139,838, and various miRNA recognition site sequences and the corresponding miRNAs disclosed in U. S. Patent Application Publication 2009/0293148. All of the patent publications referenced in this paragraph are incorporated herein by reference in their entirety. In embodiments, multiple edits in a genome are employed to obtain a desired phenotype or trait in plant. In an embodiment, one or more edits (addition, deletion, or substitution of one or more nucleotides) of an endogenous nucleotide sequence is made to provide a general phenotype; addition of at least one small RNA recognition site by insertion of the recognition site sequence at a DSB that is functionally linked to the edited endogenous nucleotide sequence achieves more specific control of expression of the edited endogenous nucleotide sequence. In an example, an endogenous plant 5-enolpyruvylshikimate-3-phosphate synthase (EPSPS) is edited to provide a glyphosate-resistant EPSPS; for example, suitable changes include the amino acid substitutions Threonine-102-Isoleucine (T1021) and Proline-106-Serine (P106S) in the maize EPSPS sequence identified by Genbank accession number X63374 (see, for example U.S. Pat. No. 6,762,344, incorporated herein by reference). In another example, an endogenous plant acetolactate synthase (ALS) is edited to increase resistance of the enzyme to various herbicides (e. g., sulfonylurea, imidazolinone, tirazolopyrimidine, pyrimidinylthiobenzoate, sulfonylamino-carbonyltriazolinone); for example, suitable changes include the amino acid substitutions G115, A116, P191, A199, K250, M345, D370, V565, W568, and F572 to the Nicotiana tabacum ALS enzyme as described in U.S. Pat. No. 5,605,011, which is incorporated herein by reference. The edited herbicide-tolerant enzyme, combined with integration of at least one small RNA recognition site for a small RNA (e. g., an siRNA or a miRNA) expressed only in a specific tissue (for example, miRNAs specifically expressed in male reproductive tissue or female reproductive tissue, e. g., the miRNAs disclosed in Table 6 of U.S. Pat. No. 8,334,430 or the siRNAs disclosed in U.S. Pat. No. 9,139,838, both incorporated herein by reference) at a DSB functionally linked to (e. g., in the 3′ untranslated region of) the edited herbicide-tolerant enzyme results in expression of the edited herbicide-tolerant enzyme being restricted to tissues other than those in which the small RNA is endogenously expressed, and those tissues in which the small RNA is expressed will not be resistant to herbicide application; this approach is useful, e. g., to provide male-sterile or female-sterile plants.

[0151] In other embodiments, the sequence of an endogenous genomic locus encoding one or more small RNAs (e. g., miRNAs, siRNAs, ta-siRNAs) is altered in order to express a small RNA having a sequence that is different from that of the endogenous small RNA and is designed to target a new sequence of interest (e. g., a sequence of a plant pest, plant pathogen, symbiont of a plant, or symbiont of a plant pest or pathogen). For example, the sequence of an endogenous or native genomic locus encoding a miRNA precursor can be altered in the mature miRNA and the miR* sequences, while maintaining the secondary structure in the resulting altered miRNA precursor sequence to permit normal processing of the transcript to a mature miRNA with a different sequence from the original, native mature miRNA sequence; see, for example, U.S. Pat. Nos. 7,786,350 and 8,395,023, both of which are incorporated by reference in their entirety herein, and which teach methods of designing engineered miRNAs. In embodiments, the sequence of an endogenous genomic locus encoding one or more small RNAs (e. g., miRNAs, siRNAs, ta-siRNAs) is altered in order to express one or more small RNA cleavage blockers (see, e. g., U.S. Pat. No. 9,040,774, which is incorporated by reference in its entirety herein). In embodiments, the sequence of an endogenous genomic locus is altered to encode a small RNA decoy (e. g., U.S. Pat. No. 8,946,511, which is incorporated by reference in its entirety herein). In embodiments, the sequence of an endogenous genomic locus that natively contains a small RNA (e. g., miRNA, siRNA, or ta-siRNA) recognition or cleavage site is altered to delete or otherwise mutate the recognition or cleavage site and thus decouple the genomic locus from small RNA regulation.

[0152] Recombinases and Recombinase Recognition Sites: In an embodiment, the polynucleotide (such as a double-stranded DNA, a single-stranded DNA, a single-stranded DNA/RNA hybrid, or a double-stranded DNA/RNA hybrid) donor molecule that is integrated (or that has a sequence that is integrated) at the site of at least one double-strand break (DSB) in a genome includes DNA that includes or encodes a recombinase recognition site sequence that is recognized by a site-specific recombinase, the specific binding agent is the corresponding site-specific recombinase, and the change of expression is upregulation or downregulation or expression of a transcript having an altered sequence (for example, expression of a transcript that has had a region of DNA excised by the recombinase). The term “recombinase recognition site sequence” refers to the DNA sequences (usually a pair of sequences) that are recognized by a site-specific (i. e., sequence-specific) recombinase in a process that allows the excision (or, in some cases, inversion or translocation) of the DNA located between the sequence-specific recombination sites. For instance, Cre recombinase recognizes either loxP recombination sites or lox511 recombination sites which are heterospecific, which means that loxP and lox511 do not recombine together (see, e. g., Odell et al. (1994) Plant Physiol., 106:447-458); FLP recombinase recognizes frt recombination sites (see, e. g., Lyznik et al. (1996) Nucleic Acids Res., 24:3784-3789); R recombinase recognizes Rs recombination sites (see, e. g., Onounchi et al. (1991) Nucleic Acids Res., 19:6373-6378); Dre recombinase recognizes rox sites (see, e. g., U.S. Pat. No. 7,422,889, incorporated herein by reference); and Gin recombinase recognizes gix sites (see, e. g., Maeser et al. (1991)Mol. Gen. Genet., 230:170-176). In a non-limiting example, a pair of polynucleotides encoding loxP recombinase recognition site sequences encoded by a pair of polynucleotide donor molecules are integrated at two separate DSBs; in the presence of the corresponding site-specific DNA recombinase Cre, the genomic sequence flanked on either side by the integrated loxP recognition sites is excised from the genome (for loxP sequences that are integrated in the same orientation relative to each other within the genome) or is inverted (for loxP sites that are integrated in an inverted orientation relative to each other within the genome) or is translocated (for loxP sites that are integrated on separate DNA molecules); such an approach is useful, e. g., for deletion or replacement of larger lengths of genomic sequence, for example, deletion or replacement of one or more protein domains. In embodiments, the recombinase recognition site sequences that are integrated at two separate DSBs are heterospecific, i. e., will not recombine together; for example, Cre recombinase recognizes either loxP recombination sites or lox511 recombination sites which are heterospecific relative to each other, which means that a loxP site and a lox511 site will not recombine together but only with another recombination site of its own type.

[0153] Integration of recombinase recognition sites is useful in plant breeding; in an embodiment, the method is used to provide a first parent plant having recombinase recognition site sequences heterologously integrated at two separate DSBs; crossing this first parent plant to a second parent plant that expresses the corresponding recombinase results in progeny plants in which the genomic sequence flanked on either side by the heterologously integrated recognition sites is excised from (or in some cases, inverted in) the genome. This approach is useful, e. g., for deletion of relatively large regions of DNA from a genome, for example, for excising DNA encoding a selectable or screenable marker that was introduced using transgenic techniques. Examples of heterologous arrangements or integration patterns of recombinase recognition sites and methods for their use, particularly in plant breeding, are disclosed in U.S. Pat. No. 8,816,153 (see, for example, the Figures and working examples), the entire specification of which is incorporated herein by reference.

[0154] Transcription Factors: In an embodiment, the sequence encoded by the donor polynucleotide (such as a double-stranded DNA, a single-stranded DNA, a single-stranded DNA/RNA hybrid, or a double-stranded DNA/RNA hybrid) donor molecule that is integrated (or that has a sequence that is integrated) at the site of at least one double-strand break (DSB) in a genome includes a transcription factor binding sequence, the specific binding agent is the corresponding transcription factor (or more specifically, the DNA-binding domain of the corresponding transcription factor), and the change in expression is upregulation or downregulation (depending on the type of transcription factor involved). In an embodiment, the transcription factor is an activating transcription factor or activator, and the change in expression is upregulation or increased expression increased expression (e.g., increased expression of at least 10%, 15%, 20%, 25%, 30%, 35%, 40%, 50%, 60%, 70%, 80%, 90%, 95%, 100% or greater, e.g., at least a 2-fold, 5-fold, 10-fold, 20-fold, 30-fold, 40-fold, 50-fold change, 100-fold or even 1000-fold change or greater) of a sequence of interest to which the transcription factor binding sequence, when integrated at a DSB in the genome, is operably linked. In some embodiments, expression is increased between 10-100%; between 2-fold and 5-fold; between 2 and 10-fold; between 10-fold and 50-fold; between 10-fold and a 100-fold; between 100-fold and 1000-fold; between 1000-fold and 5,000-fold; between 5,000-fold and 10,000 fold. In some embodiments, a targeted insertion may decrease expression by at least 1%, 5%, 10%, 15%, 20%, 25%, 30%, 35%, 40%, 50%, 60%, 70%, 80%, 90%, 95%, 99% or more. In another embodiment, the transcription factor is a repressing transcription factor or repressor, and the change in expression is downregulation or decreased expression (e.g., decreased expression by at least 1%, 5%, 10%, 15%, 20%, 25%, 30%, 35%, 40%, 50%, 60%, 70%, 80%, 90%, 95%, 99% or more) of a sequence of interest to which the transcription factor binding sequence when integrated at a DSB in the genome, is operably linked. Embodiments of transcription factors include hormone receptors, e. g., nuclear receptors, which include both a hormone-binding domain and a DNA-binding domain; in embodiments, the polynucleotide donor molecule that is integrated (or that has a sequence that is integrated) at the site of at least one double-strand break (DSB) in a genome includes or encodes a hormone-binding domain of a nuclear receptor or a DNA-binding domain of a nuclear receptor. Various non-limiting examples of transcription factor binding sequences and transcription factors are provided in the working Examples and Table 24. In embodiments, the sequence recognizable by a specific binding agent is a transcription factor binding sequence selected from those publicly disclosed at arabidopsis[dot]med[dot]ohio-state[dot]edu/AtcisDB/bindingsites[dot]html and neomorph[dot]salk[dot]edu/dap_web/pages/index[dot]php. In certain embodiments, the sequence recognizable by a specific binding agent is a transcription factor binding sequence comprising the sequence GTAAGCGCTTACGTAAGCGCTTACGTAAGCGCTTAC set forth in SEQ ID NO:1030, the specific binding agent is the corresponding transcription factor, and the change in expression is upregulation.

[0155] To summarize, the methods described herein permit sequences encoded by donor polynucleotides to be inserted, in a non-multiplexed or multiplexed manner, into a plant cell genome for the purpose of modulating gene expression in a number of distinct ways. Gene expression can be modulated up or down, for example, by tuning expression through the insertion of enhancer elements and transcription start sequences (e.g., nitrate response elements and auxin binding elements). Conditional transcription factor binding sites can be added or modified to allow additional control. Similarly, transcript stabilizing and/or destabilizing sequences can be inserted using the methods herein. Via the targeted insertion of stop codons, RNAi cleavage sites, or sites for recombinases, the methods described herein allow the transcription of particular sequences to be selectively turned off (likewise, the targeted removal of such sequences can be used to turn gene transcription on).

[0156] The plant genome targeting methods disclosed herein also enable transcription rates to be adjusted by the modification (optimization or de-optimization) of core promoter sequences (e.g., TATAA boxes). Proximal control elements (e.g., GC boxes; CAAT boxes) can likewise be modified. Enhancer or repressor motifs can be inserted or modified. Three-dimensional structural barriers in DNA that inhibit RNA polymerase can be created or removed via the targeted insertion of sequences, or by the modification of existing sequences. Where intron mediated enhancement is known to affect transcript rate, the relevant rate-affecting sequences can be optimized or de-optimized (by insertion of additional sequences or modification of existing sequences) to further enhance or diminish transcription. Through the insertion or modification of sequences using the targeting methods described herein (including multiplexed targeting methods), mRNA stability and processing can be modulated (thereby modulating gene expression). For example, mRNA stabilizing or destabilizing motifs can be inserted, removed or modified; mRNA splicing donor/acceptor sites can be inserted, removed or modified and, in some instance, create the possibility of increased control over alternate splicing. Similarly, miRNA binding sites can be added, removed or modified using the methods described herein. Epigenetic regulation of transcription can also be adjusted according to the methods described herein (e.g., by increasing or decreasing the degree of methylation of DNA, or the degree of methylation or acetylation of histones). Epigenetic regulation using the tools and methods described herein can be combined with other methods for modifying genetic sequences described herein, for the purpose of modifying a trait of a plant cell or plant, or for creating populations of modified cells and cells from which desired phenotypes can be selected.

[0157] The plant genome targeting methods described herein can also be used to modulate translation efficiency by, e.g., modifying codon usage towards or away from a particular plant cell's bias. Similarly, through the use of the targeting methods described herein, KOZAK sequences can be optimized or deoptimized, mRNA folding and structures affecting initiation of translation can be altered, and upstream reading frames can be created or destroyed. Through alteration of coding sequences using the targeted genome modification methods described herein, the abundance and/or activity of translated proteins can be adjusted. For example, the amino acid sequences in active sites or functional sites of proteins can be modified to increase or decrease the activity of the protein as desired; in addition, or alternatively, protein stabilizing or destabilizing motifs can be added or modified. All of the gene expression and activity modification schemes described herein can be utilized in various combinations to fine-tune gene expression and activity. Using the multiplexed targeting methods described herein, a plurality of specific targeted modifications can be achieved in a plant cell without intervening selection or sequencing steps. Modified plant cells comprising specifically targeted and modified genomes

[0158] Another aspect of the disclosure includes the cell, such as a plant cell, provided by the methods disclosed herein. In an embodiment, a plant cell thus provided includes in its genome a heterologous DNA sequence that includes: (a) nucleotide sequence of a polynucleotide (such as a double-stranded DNA, a single-stranded DNA, a single-stranded DNA/RNA hybrid, or a double-stranded DNA/RNA hybrid) molecule integrated at the site of a DSB in a genome; and (b) genomic nucleotide sequence adjacent to the site of the DSB. In embodiments, the methods disclosed herein for integrating a sequence encoded by a polynucleotide donor molecule into the site of a DSB are applied to a plant cell (e. g., a plant cell or plant protoplast isolated from a whole plant or plant part or plant tissue, or an isolated plant cell or plant protoplast in suspension or plate culture); in other embodiments, the methods are applied to non-isolated plant cells in situ or in planta, such as a plant cell located in an intact or growing plant or in a plant part or tissue. The methods disclosed herein for integrating a sequence encoded by a polynucleotide donor molecule into the site of a DSB are also useful in introducing heterologous sequence at the site of a DSB induced in the genome of other photosynthetic eukaryotes (e. g., green algae, red algae, diatoms, brown algae, and dinoflagellates). In embodiments, the plant cell or plant protoplast is capable of division and further differentiation. In embodiments, the plant cell or plant protoplast is obtained or isolated from a plant or part of a plant selected from the group consisting of a plant tissue, a whole plant, an intact nodal bud, a shoot apex or shoot apical meristem, a root apex or root apical meristem, lateral meristem, intercalary meristem, a seedling (e. g., a germinating seed or small seedling or a larger seedling with one or more true leaves), a whole seed (e. g., an intact seed, or a seed with part or all of its seed coat removed or treated to make permeable), a halved seed or other seed fragment, a zygotic or somatic embryo (e. g., a mature dissected zygotic embryo, a developing zygotic or somatic embryo, a dry or rehydrated or freshly excised zygotic embryo), pollen, microspores, epidermis, flower, and callus.

[0159] In some embodiments, the method includes the additional step of growing or regenerating a plant from a plant cell containing the heterologous DNA sequence of the polynucleotide donor molecule integrated at the site of a DSB and genomic nucleotide sequence adjacent to the site of the DSB, wherein the plant includes at least some cells that contain the heterologous DNA sequence of the polynucleotide donor molecule integrated at the site of a DSB and genomic nucleotide sequence adjacent to the site of the DSB. In embodiments, callus is produced from the plant cell, and plantlets and plants produced from such callus. In other embodiments, whole seedlings or plants are grown directly from the plant cell without a callus stage. Thus, additional related aspects are directed to whole seedlings and plants grown or regenerated from the plant cell or plant protoplast containing sequence encoded by a polynucleotide (such as a double-stranded DNA, a single-stranded DNA, a single-stranded DNA/RNA hybrid, or a double-stranded DNA/RNA hybrid) donor molecule heterologously integrated at the site of a DSB, as well as the seeds of such plants; embodiments include whole seedlings and plants grown or regenerated from the plant cell or plant protoplast containing sequence encoded by a polynucleotide donor molecule heterologously integrated at the site of two or more DSBs, as well as the seeds of such plants. In embodiments, the grown or regenerated plant exhibits a phenotype associated with the sequence encoded by a polynucleotide donor molecule heterologously integrated at the site of a DSB. In embodiments, the grown or regenerated plant includes in its genome two or more genetic modifications that in combination provide at least one phenotype of interest, wherein at least one of the two or more genetic modifications includes the sequence encoded by a polynucleotide donor molecule heterologously integrated at the site of a DSB in the genome, or wherein the two or more genetic modifications include sequence encoded by at least one polynucleotide donor heterologously integrated at two or more DSBs in the genome, or wherein the two or more genetic modifications include sequences encoded by multiple polynucleotides donor molecules heterologously integrated at different DSBs in the genome. In embodiments, a heterogeneous population of plant cells or plant protoplasts, at least some of which include sequence encoded by at least one polynucleotide donor molecule heterologously integrated at the site of a DSB, is provided by the method; related aspects include a plant having a phenotype of interest associated with sequence encoded by the polynucleotide donor molecule heterologously integrated at the site of a DSB, provided by either regeneration of a plant having the phenotype of interest from a plant cell or plant protoplast selected from the heterogeneous population of plant cells or plant protoplasts, or by selection of a plant having the phenotype of interest from a heterogeneous population of plants grown or regenerated from the population of plant cells or plant protoplasts. Examples of phenotypes of interest include (but are not limited to) herbicide resistance; improved tolerance of abiotic stress (e. g., tolerance of temperature extremes, drought, or salt) or biotic stress (e. g., resistance to bacterial or fungal pathogens); improved utilization of nutrients or water; synthesis of new or modified amounts of lipids, carbohydrates, proteins or other chemicals, including medicinal compounds; improved flavor or appearance; improved photosynthesis; improved storage characteristics (e. g., resistance to bruising, browning, or softening); increased yield; altered morphology (e. g., floral architecture or color, plant height, branching, root structure); and changes in flowering time. In an embodiment, a heterogeneous population of plant cells or plant protoplasts (or seedlings or plants grown or regenerated therefrom) is exposed to conditions permitting expression of the phenotype of interest; e. g., selection for herbicide resistance can include exposing the population of plant cells or plant protoplasts (or seedlings or plants) to an amount of herbicide or other substance that inhibits growth or is toxic, allowing identification and selection of those resistant plant cells or plant protoplasts (or seedlings or plants) that survive treatment. In certain embodiments, a proxy measurement can be taken of an aspect of a modified plant or plant cell, where the measurement is indicative of a desired phenotype or trait. For example, the modification of one or more targeted sequences in a genome may provide a measurable change in a molecule (e.g., a detectable change in the structure of a molecule, or a change in the amount of the molecule that is detected, or the presence or absence of a molecule) that can be used as a biomarker for a presence of a desired phenotype or trait. The proper insertion of an enhancer for increasing expression of an enzyme, for example, may be determined by detecting lower levels of the enyzme's substrate.

[0160] In some embodiments, modified plants are produced from cells modified according to the methods described herein without a tissue culturing step. In certain embodiments, the modified plant cell or plant does not have significant losses of methylation compared to a non-modified parent plant cell or plant. For example, the modified plant lacks significant losses of methylation in one or more promoter regions relative to the parent plant cell or plant. Similarly, in certain embodiments, an modified plant or plant cell obtained using the methods described herein lacks significant losses of methylation in protein coding regions relative to the parent cell or parent plant before modification using the modifying methods described herein.

[0161] Also contemplated are new heterogeneous populations, arrays, or libraries of plant cells and plants created by the introduction of targeted modifications at one more locations in the genome. Plant compositions of the disclosure include succeeding generations or seeds of modified plants that are grown or regenerated from plant cells or plant protoplasts modified according to the methods herein, as well as parts of those plants (including plant parts used in grafting as scions or rootstocks), or products (e. g., fruits or other edible plant parts, cleaned grains or seeds, edible oils, flours or starches, proteins, and other processed products) made from these plants or their seeds. Embodiments include plants grown or regenerated from the plant cells or plant protoplasts, wherein the plants contain cells or tissues that do not have sequence encoded by the polynucleotide donor molecule heterologously integrated at the site of a DSB, e. g., grafted plants in which the scion or rootstock contains sequence encoded by the polynucleotide donor molecule heterologously integrated at the site of a DSB, or chimeric plants in which some but not all cells or tissues contain sequence encoded by the polynucleotide donor molecule heterologously integrated at the site of a DSB. Plants in which grafting is commonly useful include many fruit trees and plants such as many citrus trees, apples, stone fruit (e. g., peaches, apricots, cherries, and plums), avocados, tomatoes, eggplant, cucumber, melons, watermelons, and grapes as well as various ornamental plants such as roses. Grafted plants can be grafts between the same or different (generally related) species. Additional related aspects include (a) a hybrid plant provided by crossing a first plant grown or regenerated from a plant cell or plant protoplast with sequence encoded by at least one polynucleotide donor molecule heterologously integrated at the site of a DSB, with a second plant, wherein the hybrid plant contains sequence encoded by the polynucleotide donor molecule heterologously integrated at the site of a DSB, and (b) a hybrid plant provided by crossing a first plant grown or regenerated from a plant cell or plant protoplast with sequence encoded by at least one polynucleotide donor molecule heterologously integrated at multiple DSB sites, with a second plant, wherein the hybrid plant contains sequence encoded by at least one polynucleotide donor molecule heterologously integrated at the site of at least one DSB; also contemplated is seed produced by the hybrid plant. Also envisioned as related aspects are progeny seed and progeny plants, including hybrid seed and hybrid plants, having the regenerated plant as a parent or ancestor. In embodiments, the plant cell (or the regenerated plant, progeny seed, and progeny plant) is diploid or polyploid. In embodiments, the plant cell (or the regenerated plant, progeny seed, and progeny plant) is haploid or can be induced to become haploid; techniques for making and using haploid plants and plant cells are known in the art, see, e. g., methods for generating haploids in Arabidopsis thaliana by crossing of a wild-type strain to a haploid-inducing strain that expresses altered forms of the centromere-specific histone CENH3, as described by Maruthachalam and Chan in “How to make haploid Arabidopsis thaliana”, a protocol publicly available at www[dot]openwetware[dot]org/images/d/d3/Haploid_Arabidopsis_protocol[dot]pdf; Ravi et al. (2014) Nature Communications, 5:5334, doi: 10.1038/ncomms6334). Examples of haploid cells include but are not limited to plant cells obtained from haploid plants and plant cells obtained from reproductive tissues, e. g., from flowers, developing flowers or flower buds, ovaries, ovules, megaspores, anthers, pollen, and microspores. In embodiments where the plant cell is haploid, the method can further include the step of chromosome doubling (e. g., by spontaneous chromosomal doubling by meiotic non-reduction, or by using a chromosome doubling agent such as colchicine, oryzalin, trifluralin, pronamide, nitrous oxide gas, anti-microtubule herbicides, anti-microtubule agents, and mitotic inhibitors) in the plant cell containing heterologous DNA sequence (i. e. sequence of the polynucleotide donor molecule integrated at the site of a DSB in the genome and genomic nucleotide sequence adjacent to the site of the DSB) to produce a doubled haploid plant cell or plant protoplast that is homozygous for the heterologous DNA sequence; yet other embodiments include regeneration of a doubled haploid plant from the doubled haploid plant cell or plant protoplast, wherein the regenerated doubled haploid plant is homozygous for the heterologous DNA sequence. Thus, aspects of the disclosure are related to the haploid plant cell or plant protoplast having the heterologous DNA sequence of the polynucleotide donor molecule integrated at the site of a DSB and genomic nucleotide sequence adjacent to the site of the DSB, as well as a doubled haploid plant cell or plant protoplast or a doubled haploid plant that is homozygous for the heterologous DNA sequence. Another aspect of the disclosure is related to a hybrid plant having at least one parent plant that is a doubled haploid plant provided by the method. Production of doubled haploid plants by these methods provides homozygosity in one generation, instead of requiring several generations of self-crossing to obtain homozygous plants; this may be particularly advantageous in slow-growing plants, such as fruit and other trees, or for producing hybrid plants that are offspring of at least one doubled-haploid plant.

[0162] Plants and plant cells that may be modified according to the methods described herein are of any species of interest, including dicots and monocots, but especially Zea species (including hybrid species).

[0163] The Zea sp. cells and derivative plants and seeds disclosed herein can be used for various purposes useful to the consumer or grower. The intact plant itself may be desirable, e. g., plants grown as cover crops or as ornamentals. In other embodiments, processed products are made from the plant or its seeds, such as extracted proteins, oils, sugars, and starches, fermentation products, animal feed or human food, wood and wood products, pharmaceuticals, and various industrial products. Thus, further related aspects of the disclosure include a processed or commodity product made from a plant or seed or plant part that includes at least some cells that contain the heterologous DNA sequence including the sequence encoded by the polynucleotide donor molecule integrated at the site of a DSB and genomic nucleotide sequence adjacent to the site of the DSB. Commodity products include, but are not limited to, harvested leaves, roots, shoots, tubers, stems, fruits, seeds, or other parts of a plant, meals, oils (edible or inedible), fiber, extracts, fermentation or digestion products, crushed or whole grains or seeds of a plant, wood and wood pulp, or any food or non-food product. Detection of a heterologous DNA sequence that includes: (a) nucleotide sequence encoded by a polynucleotide donor molecule integrated at the site of a DSB in a genome; and (b) genomic nucleotide sequence adjacent to the site of the DSB in such a commodity product is de facto evidence that the commodity product contains or is derived from a plant cell, plant, or seed of this disclosure.

[0164] In another aspect, the disclosure provides a heterologous nucleotide sequence including: (a) nucleotide sequence encoded by a polynucleotide donor molecule integrated by the methods disclosed herein at the site of a DSB in a genome, and (b) genomic nucleotide sequence adjacent to the site of the DSB. Related aspects include a plasmid, vector, or chromosome including such a heterologous nucleotide sequence, as well as polymerase primers for amplification (e. g., PCR amplification) of such a heterologous nucleotide sequence.

### Compositions and Reaction Mixtures

[0165] In one aspect, the disclosure provides a composition including: (a) a cell; and (b) a polynucleotide (such as a double-stranded DNA, a single-stranded DNA, a single-stranded DNA/RNA hybrid, or a double-stranded DNA/RNA hybrid) donor molecule that is capable of being integrated (or having its sequence integrated) (preferably by non-homologous end-joining (NHEJ)) at one or more double-strand breaks in a genome in the cell. In many embodiments of the composition, the cell is a plant cell, e. g., an isolated plant cell or a plant protoplast, or a plant cell in a plant, plant part, plant tissue, or callus. In certain embodiments, the cell is that of a photosynthetic eukaryote (e. g., green algae, red algae, diatoms, brown algae, and dinoflagellates).

[0166] In various embodiments of the composition, the plant cell is a plant cell or plant protoplast isolated from a whole plant or plant part or plant tissue (e. g., a plant cell or plant protoplast cultured in liquid medium or on solid medium), or a plant cell located in callus, an intact plant, seed, or seedling, or in a plant part or tissue. In embodiments, the plant cell is a cell of a monocot plant or of a dicot plant. In many embodiments, the plant cell is a plant cell capable of division and/or differentiation, including a plant cell capable of being regenerated into callus or a plant. In embodiments, the plant cell is capable of division and further differentiation, even capable of being regenerated into callus or into a plant. In embodiments, the plant cell is diploid, polyploid, or haploid (or can be induced to become haploid).

[0167] In embodiments, the composition includes a plant cell that includes at least one double-strand break (DSB) in its genome. Alternatively, the composition includes a plant cell in which at least one DSB will be induced in its genome, for example, by providing at least one DSB-inducing agent to the plant cell, e. g., either together with the polynucleotide (such as a double-stranded DNA, a single-stranded DNA, a single-stranded DNA/RNA hybrid, or a double-stranded DNA/RNA hybrid) donor molecule or separately. Thus, the composition optionally further includes at least one DSB-inducing agent. In embodiments, the composition optionally further includes at least one chemical, enzymatic, or physical delivery agent, or a combination thereof; such delivery agents and methods for their use are described in detail in the paragraphs following the heading “Delivery Methods and Delivery Agents”. In embodiments, the DSB-inducing agent is at least one of the group consisting of:
[0168] (a) a nuclease selected from the group consisting of an RNA-guided nuclease, an RNA-guided DNA endonuclease, a type II Cas nuclease, a Cas9, a type V Cas nuclease, a Cpf1 (Cas12a) nuclease, a CasY (Cas12d) nuclease, a CasX (Cas12e) nuclease, a C2c1 nuclease, a C2c3 nuclease, Cas12f nuclease, Cas12i nuclease, Cas12j_nuclease, an engineered nuclease, a codon-optimized nuclease, a zinc-finger nuclease (ZFN), a transcription activator-like effector nuclease (TAL-effector nuclease), an Argonaute, and a meganuclease or engineered meganuclease;
[0169] (b) a polynucleotide encoding one or more nucleases capable of effecting site-specific alteration (such as introduction of a DSB) of a target nucleotide sequence; and
[0170] (c) a guide RNA (gRNA) for an RNA-guided nuclease, or a DNA encoding a gRNA for an RNA-guided nuclease.

[0171] In embodiments, the composition includes (a) a cell; (b) a polynucleotide (such as a double-stranded DNA, a single-stranded DNA, a single-stranded DNA/RNA hybrid, or a double-stranded DNA/RNA hybrid) donor molecule, capable of being integrated (or having its sequence integrated) at a DSB; (c) a Cas9, a Cpf1 (Cas12a), a CasY (Cas12d), a CasX (Cas12e), a C2c1, a C2c3, Cas12f, Cas12i, or Cas12j nuclease; and (d) at least one guide RNA. In an embodiment, the composition includes (a) a cell; (b) a polynucleotide (such as a double-stranded DNA, a single-stranded DNA, a single-stranded DNA/RNA hybrid, or a double-stranded DNA/RNA hybrid) donor molecule, capable of being integrated (or having its sequence integrated) at a DSB; (c) at least one ribonucleoprotein including a CRISPR nuclease and a guide RNA.

[0172] In embodiments of the composition, the polynucleotide donor molecule is double-stranded and blunt-ended, or is double stranded and has an overhang or “sticky end” consisting of unpaired nucleotides (e. g., 1, 2, 3, 4, 5, or 6 unpaired nucleotides) at one terminus or both termini; in other embodiments, the polynucleotide donor molecule is a single-stranded DNA or a single-stranded DNA/RNA hybrid. In an embodiment, the polynucleotide donor molecule is a double-stranded DNA or DNA/RNA hybrid molecule that is blunt-ended or that has an overhang at one terminus or both termini, and that has about 18 to about 300 base-pairs, or about 20 to about 200 base-pairs, or about 30 to about 100 base-pairs, and having at least one phosphorothioate bond between adjacent nucleotides at a 5′ end, 3′ end, or both 5′ and 3′ ends. In embodiments, the polynucleotide donor molecule is a double-stranded DNA, a single-stranded DNA, a single-stranded DNA/RNA hybrid, or a double-stranded DNA/RNA hybrid, and includes single strands of at least 11, at least 18, at least 20, at least 30, at least 40, at least 60, at least 80, at least 100, at least 120, at least 140, at least 160, at least 180, at least 200, at least 240, at least 280, or at least 320 nucleotides. In embodiments, the polynucleotide donor molecule includes chemically modified nucleotides; in embodiments, the naturally occurring phosphodiester backbone of the polynucleotide molecule is partially or completely modified with phosphorothioate, phosphorodithioate, or methylphosphonate internucleotide linkage modifications, or the polynucleotide donor molecule includes modified nucleoside bases or modified sugars, or the polynucleotide donor molecule is labelled with a fluorescent moiety or other detectable label. In an embodiment, the polynucleotide donor molecule is double-stranded and perfectly base-paired through all or most of its length, with the possible exception of any unpaired nucleotides at either terminus or both termini. In another embodiment, the polynucleotide donor molecule is double-stranded and includes one or more non-terminal mismatches or non-terminal unpaired nucleotides within the otherwise double-stranded duplex. Other related embodiments include single- or double-stranded DNA/RNA hybrid donor molecules. Additional description of the polynucleotide donor molecule is found above in the paragraphs following the heading “Polynucleotide Molecules”.

[0173] In embodiments of the composition, the polynucleotide donor molecule includes:
[0174] (a) a nucleotide sequence that is recognizable by a specific binding agent;
[0175] (b) a nucleotide sequence encoding an RNA molecule or an amino acid sequence that is recognizable by a specific binding agent;
[0176] (c) a nucleotide sequence that encodes an RNA molecule or an amino acid sequence that binds specifically to a ligand;
[0177] (d) a nucleotide sequence that is responsive to a specific change in the physical environment; or
[0178] (e) a nucleotide sequence encoding an RNA molecule or an amino acid sequence that is responsive to a specific change in the physical environment;
[0179] (f) a nucleotide sequence encoding at least one stop codon on each strand;
[0180] (g) a nucleotide sequence encoding at least one stop codon within each reading frame on each strand; or
[0181] (h) at least partially self-complementary sequence, such that the polynucleotide molecule encodes a transcript that is capable of forming at least partially double-stranded RNA; or
[0182] (i) a combination of any of (a)-(h).

[0183] Additional description relating to these various embodiments of nucleotide sequences included in the polynucleotide donor molecule is found in the section headed “Methods of changing expression of a sequence of interest in a genome”.

[0184] In another aspect, the disclosure provides a reaction mixture including: (a) a plant cell having a double-strand break (DSB) at least one locus in its genome; and (b) a polynucleotide (such as a double-stranded DNA, a single-stranded DNA, a single-stranded DNA/RNA hybrid, or a double-stranded DNA/RNA hybrid) donor molecule capable of being integrated or inserted (or having its sequence integrated or inserted) at the DSB (preferably by non-homologous end-joining (NHEJ)), with a length of between about 18 to about 300 base-pairs (or nucleotides, if single-stranded), or between about 30 to about 100 base-pairs (or nucleotides, if single-stranded); wherein sequence encoded by the polynucleotide donor molecule, if integrated at the DSB, forms a heterologous insertion (that is to say, resulting in a concatenated nucleotide sequence that is a combination of the sequence of the polynucleotide molecule and at least some of the genomic sequence adjacent to the site of DSB, wherein the concatenated sequence is heterologous, i. e., would not otherwise or does not normally occur at the site of insertion). In embodiments, the product of the reaction mixture includes a plant cell in which sequence encoded by the polynucleotide donor molecule has been integrated at the site of the DSB.

[0185] In many embodiments of the reaction mixture, the cell is a plant cell, e. g., an isolated plant cell or a plant protoplast, or a plant cell in a plant, plant part, plant tissue, or callus. In various embodiments of the reaction mixture, the plant cell is a plant cell or plant protoplast isolated from a whole plant or plant part or plant tissue (e. g., a plant cell or plant protoplast cultured in liquid medium or on solid medium), or a plant cell located in callus, an intact plant, seed, or seedling, or in a plant part or tissue. In embodiments, the plant cell is a cell of a monocot plant or of a dicot plant. In many embodiments, the plant cell is a plant cell capable of division and/or differentiation, including a plant cell capable of being regenerated into callus or a plant. In embodiments, the plant cell is capable of division and further differentiation, even capable of being regenerated into callus or into a plant. In embodiments, the plant cell is diploid, polyploid, or haploid (or can be induced to become haploid).

[0186] In embodiments, the reaction mixture includes a plant cell that includes at least one double-strand break (DSB) in its genome. Alternatively, the reaction mixture includes a plant cell in which at least one DSB will be induced in its genome, for example, by providing at least one DSB-inducing agent to the plant cell, e. g., either together with a polynucleotide (such as a double-stranded DNA, a single-stranded DNA, a single-stranded DNA/RNA hybrid, or a double-stranded DNA/RNA hybrid) donor molecule capable of being integrated or inserted (or having its sequence integrated or inserted) at the DSB, or separately. Thus, the reaction mixture optionally further includes at least one DSB-inducing agent. In embodiments, the reaction mixture optionally further includes at least one chemical, enzymatic, or physical delivery agent, or a combination thereof; such delivery agents and methods for their use are described in detail in the paragraphs following the heading “Delivery Methods and Delivery Agents”. In embodiments, the DSB-inducing agent is at least one of the group consisting of:
[0187] (a) a nuclease selected from the group consisting of an RNA-guided nuclease, an RNA-guided DNA endonuclease, a type II Cas nuclease, a Cas9, a type V Cas nuclease, a Cpf1 (Cas12a) nuclease, a CasY (Cas12d) nuclease, a CasX (Cas12e) nuclease, a C2c1 nuclease, a C2c3 nuclease, Cas12f nuclease, Cas12i nuclease, Cas12j_nuclease, an engineered nuclease, a codon-optimized nuclease, a zinc-finger nuclease (ZFN), a transcription activator-like effector nuclease (TAL-effector nuclease), an Argonaute, and a meganuclease or engineered meganuclease;
[0188] (b) a polynucleotide encoding one or more nucleases capable of effecting site-specific alteration (such as introduction of a DSB) of a target nucleotide sequence; and
[0189] (c) a guide RNA (gRNA) for an RNA-guided nuclease, or a DNA encoding a gRNA for an RNA-guided nuclease.

[0190] In embodiments, the reaction mixture includes (a) a plant cell; (b) a polynucleotide (such as a double-stranded DNA, a single-stranded DNA, a single-stranded DNA/RNA hybrid, or a double-stranded DNA/RNA hybrid) donor molecule capable of being integrated or inserted (or having its sequence integrated or inserted) at the DSB; (c) a Cas9, a Cpf1 (Cas12a), a CasY (Cas12d), a CasX (Cas12e), a C2c1, a C2c3, Cas12f, Cas12i, or Cas12j nuclease; and (d) at least one guide RNA. In an embodiment, the reaction mixture includes (a) a plant cell or a plant protoplast; (b) a polynucleotide (such as a double-stranded DNA, a single-stranded DNA, a single-stranded DNA/RNA hybrid, or a double-stranded DNA/RNA hybrid) donor molecule capable of being integrated or inserted (or having its sequence integrated or inserted) at the DSB; (c) at least one ribonucleoprotein including a CRISPR nuclease and a guide RNA. In an embodiment, the reaction mixture includes (a) plant cell or a plant protoplast; (b) a polynucleotide (such as a double-stranded DNA, a single-stranded DNA, a single-stranded DNA/RNA hybrid, or a double-stranded DNA/RNA hybrid) donor molecule capable of being integrated or inserted (or having its sequence integrated or inserted) at the DSB; (c) at least one ribonucleoprotein including Cas9 and an sgRNA.

[0191] In embodiments of the reaction mixture, the polynucleotide (such as a double-stranded DNA, a single-stranded DNA, a single-stranded DNA/RNA hybrid, or a double-stranded DNA/RNA hybrid) donor molecule includes:
[0192] (a) a nucleotide sequence that is recognizable by a specific binding agent;
[0193] (b) a nucleotide sequence encoding an RNA molecule or an amino acid sequence that is recognizable by a specific binding agent;
[0194] (c) a nucleotide sequence that encodes an RNA molecule or an amino acid sequence that binds specifically to a ligand;
[0195] (d) a nucleotide sequence that is responsive to a specific change in the physical environment; or (e) a nucleotide sequence encoding an RNA molecule or an amino acid sequence that is responsive to a specific change in the physical environment;
[0196] (f) a nucleotide sequence encoding at least one stop codon on each strand;
[0197] (g) a nucleotide sequence encoding at least one stop codon within each reading frame on each strand; or
[0198] (h) at least partially self-complementary sequence, such that the polynucleotide molecule encodes a transcript that is capable of forming at least partially double-stranded RNA; or
[0199] (i) a combination of any of (a)-(h).

[0200] Additional description relating to these various embodiments of nucleotide sequences included in the polynucleotide donor molecule is found in the section headed “Methods of changing expression of a sequence of interest in a genome”.

### Polynucleotides for Disrupting Gene Expression

[0201] In another aspect, the disclosure provides a polynucleotide (such as a double-stranded DNA, a single-stranded DNA, a single-stranded DNA/RNA hybrid, or a double-stranded DNA/RNA hybrid) molecule for disrupting gene expression, including double-stranded polynucleotides containing at least 18 base-pairs and encoding at least one stop codon in each possible reading frame on each strand and single-stranded polynucleotides containing at least 11 contiguous nucleotides and encoding at least one stop codon in each possible reading frame on the strand. Such a stop-codon-containing polynucleotide, when integrated or inserted at the site of a DSB in a genome, disrupts or hinders translation of an encoded amino acid sequence. In embodiments, the polynucleotide is a double-stranded DNA or double-stranded DNA/RNA hybrid molecule including at least 18 contiguous base-pairs and encoding at least one stop codon in each possible reading frame on either strand; in embodiments, the polynucleotide is a double-stranded DNA or double-stranded DNA/RNA hybrid molecule that is blunt-ended; in other embodiments, the polynucleotide is a double-stranded DNA or double-stranded DNA/RNA hybrid molecule that has one or more overhangs or unpaired nucleotides at one or both termini. In embodiments, the polynucleotide is double-stranded and includes between about 18 to about 300 nucleotides on each strand. In embodiments, the polynucleotide is a single-stranded DNA or a single-stranded DNA/RNA hybrid molecule including at least 11 contiguous nucleotides and encoding at least one stop codon in each possible reading frame on the strand. In embodiments, the polynucleotide is single-stranded and includes between 11 and about 300 contiguous nucleotides in the strand.

[0202] In embodiments, the polynucleotide for disrupting gene expression further includes a nucleotide sequence that provides a useful function when integrated into the site of a DSB in a genome. For example, in various non-limiting embodiments the polynucleotide further includes: sequence that is recognizable by a specific binding agent or that binds to a specific molecule or encodes an RNA molecule or an amino acid sequence that binds to a specific molecule, or sequence that is responsive to a specific change in the physical environment or encodes an RNA molecule or an amino acid sequence that is responsive to a specific change in the physical environment, or heterologous sequence, or sequence that serves to stop transcription at the site of the DSB, or sequence having secondary structure (e. g., double-stranded stems or stem-loops) or than encodes a transcript having secondary structure (e. g., double-stranded RNA that is cleavable by a Dicer-type ribonuclease).

[0203] In an embodiment, the polynucleotide for disrupting gene expression is a double-stranded DNA or a double-stranded DNA/RNA hybrid molecule, wherein each strand of the polynucleotide includes at least 18 and fewer than 200 contiguous base-pairs, wherein the number of base-pairs is not divisible by 3, and wherein each strand encodes at least one stop codon in each possible reading frame in the 5′ to 3′ direction. In an embodiment, the polynucleotide is a double-stranded DNA or a double-stranded DNA/RNA hybrid molecule, wherein the polynucleotide includes at least one phosphorothioate modification.

[0204] Related aspects include larger polynucleotides such as a plasmid, vector, or chromosome including the polynucleotide for disrupting gene expression, as well as polymerase primers for amplification of the polynucleotide for disrupting gene expression.

### Methods of Identifying the Locus of a Double-Stranded Break

[0205] In another aspect, the disclosure provides a method of identifying the locus of at least one double-stranded break (DSB) in genomic DNA in a cell (such as a plant cell or plant protoplast) including the genomic DNA, the method including: (a) contacting the genomic DNA having a DSB with a polynucleotide (such as a double-stranded DNA, a single-stranded DNA, a single-stranded DNA/RNA hybrid, or a double-stranded DNA/RNA hybrid) molecule, wherein the polynucleotide donor molecule is capable of being integrated (or having its sequence integrated) at the DSB and has a length of at least 2, at least 3, at least 4, at least 5, at least 6, at least 7, at least 8, at least 9, at least 10, or at least 11 base-pairs if double-stranded (or nucleotides if single-stranded), or between about 2 to about 320 base-pairs if double-stranded (or nucleotides if single-stranded), or between about 2 to about 500 base-pairs if double-stranded (or nucleotides if single-stranded), or between about 5 to about 500 base-pairs if double-stranded (or nucleotides if single-stranded), or between about 5 to about 300 base-pairs if double-stranded (or nucleotides if single-stranded), or between about 11 to about 300 base-pairs if double-stranded (or nucleotides if single-stranded), or about 18 to about 300 base-pairs if double-stranded (or nucleotides if single-stranded), or between about 30 to about 100 base-pairs if double-stranded (or nucleotides if single-stranded); wherein sequence encoded by the polynucleotide donor molecule, if integrated at the DSB, forms a heterologous insertion; and (b) using at least part of the sequence encoded by the polynucleotide molecule as a target for PCR primers to allow amplification of DNA in the locus of the double-stranded break. In embodiments, the genomic DNA is that of a nucleus, mitochondrion, or plastid. In embodiments, the DSB locus is identified by amplification using primers specific for DNA sequence encoded by the polynucleotide molecule alone; in other embodiments, the DSB locus is identified by amplification using primers specific for a combination of DNA sequence encoded by the polynucleotide donor molecule and genomic DNA sequence flanking the DSB. Such identification using a heterologously integrated DNA sequence (i. e., that encoded by the polynucleotide molecule) is useful, e. g., to distinguish a cell (such as a plant cell or plant protoplast) containing sequence encoded by the polynucleotide molecule integrated at the DSB from a cell that does not. Identification of an edited genome from a non-edited genome is important for various purposes, e. g., for commercial or regulatory tracking of cells or biological material such as plants or seeds containing an edited genome.

[0206] In a related aspect, the disclosure provides a method of identifying the locus of double-stranded breaks (DSBs) in genomic DNA in a pool of cells (such as a pool of plant cells or plant protoplasts), wherein the pool of cells includes cells having genomic DNA with sequence encoded by a polynucleotide (such as a double-stranded DNA, a single-stranded DNA, a single-stranded DNA/RNA hybrid, or a double-stranded DNA/RNA hybrid) donor molecule inserted at the locus of the double stranded breaks; wherein the polynucleotide donor molecule is capable of being integrated (or having its sequence integrated) at the DSB and has a length of at least 2, at least 3, at least 4, at least 5, at least 6, at least 7, at least 8, at least 9, at least 10, or at least 11 base-pairs if double-stranded (or nucleotides if single-stranded), or between about 2 to about 320 base-pairs if double-stranded (or nucleotides if single-stranded), or between about 2 to about 500 base-pairs if double-stranded (or nucleotides if single-stranded), or between about 5 to about 500 base-pairs if double-stranded (or nucleotides if single-stranded), or between about 5 to about 300 base-pairs if double-stranded (or nucleotides if single-stranded), or between about 11 to about 300 base-pairs if double-stranded (or nucleotides if single-stranded), or about 18 to about 300 base-pairs if double-stranded (or nucleotides if single-stranded), or between about 30 to about 100 base-pairs if double-stranded (or nucleotides if single-stranded); wherein sequence encoded by the polynucleotide donor molecule, if integrated at the DSB, forms a heterologous insertion; wherein the sequence encoded by the polynucleotide molecule is used as a target for PCR primers to allow amplification of DNA in the region of the double-stranded breaks. In embodiments, the genomic DNA is that of a nucleus, mitochondrion, or plastid. In embodiments, the pool of cells is a population of plant cells or plant protoplasts, wherein the population of plant cells or plant protoplasts include multiple different DSBs (e. g., induced by different guide RNAs) in the genome. In embodiments, each DSB locus is identified by amplification using primers specific for DNA sequence encoded by the polynucleotide molecule alone; in other embodiments, each DSB locus is identified by amplification using primers specific for a combination of DNA sequence encoded by the polynucleotide molecule and genomic DNA sequence flanking the DSB. Such identification using a heterologously integrated DNA sequence (i. e., sequence encoded by the polynucleotide molecule) is useful, e. g., to identify a cell (such as a plant cell or plant protoplast) containing sequence encoded by the polynucleotide molecule integrated at a DSB from a cell that does not.

[0207] In embodiments, the pool of cells is a pool of isolated plant cells or plant protoplasts in liquid or suspension culture, or cultured in or on semi-solid or solid media. In embodiments, the pool of cells is a pool of plant cells or plant protoplasts encapsulated in a polymer or other encapsulating material, enclosed in a vesicle or liposome, or embedded in or attached to a matrix or other solid support (e. g., beads or microbeads, membranes, or solid surfaces). In embodiments, the pool of cells is a pool of plant cells or plant protoplasts encapsulated in a polysaccharide (e. g., pectin, agarose). In embodiments, the pool of cells is a pool of plant cells located in a plant, plant part, or plant tissue, and the cells are optionally isolated from the plant, plant part, or plant tissue in a step following the integration of a polynucleotide at a DSB.

[0208] In embodiments, the polynucleotide donor molecule that is integrated (or has sequence that is integrated) at the DSB is double-stranded and blunt-ended; in other embodiments the polynucleotide donor molecule is double-stranded and has an overhang or “sticky end” consisting of unpaired nucleotides (e. g., 1, 2, 3, 4, 5, or 6 unpaired nucleotides) at one terminus or both termini. In an embodiment, the polynucleotide donor molecule that is integrated (or has sequence that is integrated) at the DSB is a double-stranded DNA or double-stranded DNA/RNA hybrid molecule of about 18 to about 300 base-pairs, or about 20 to about 200 base-pairs, or about 30 to about 100 base-pairs, and having at least one phosphorothioate bond between adjacent nucleotides at a 5′ end, 3′ end, or both 5′ and 3′ ends.

[0209] In embodiments, the polynucleotide donor molecule includes single strands of at least 11, at least 18, at least 20, at least 30, at least 40, at least 60, at least 80, at least 100, at least 120, at least 140, at least 160, at least 180, at least 200, at least 240, at least 280, or at least 320 nucleotides. In embodiments, the polynucleotide donor molecule has a length of at least 2, at least 3, at least 4, at least 5, at least 6, at least 7, at least 8, at least 9, at least 10, or at least 11 base-pairs if double-stranded (or nucleotides if single-stranded), or between about 2 to about 320 base-pairs if double-stranded (or nucleotides if single-stranded), or between about 2 to about 500 base-pairs if double-stranded (or nucleotides if single-stranded), or between about 5 to about 500 base-pairs if double-stranded (or nucleotides if single-stranded), or between about 5 to about 300 base-pairs if double-stranded (or nucleotides if single-stranded), or between about 11 to about 300 base-pairs if double-stranded (or nucleotides if single-stranded), or about 18 to about 300 base-pairs if double-stranded (or nucleotides if single-stranded), or between about 30 to about 100 base-pairs if double-stranded (or nucleotides if single-stranded). In embodiments, the polynucleotide donor molecule includes chemically modified nucleotides; in embodiments, the naturally occurring phosphodiester backbone of the polynucleotide donor molecule is partially or completely modified with phosphorothioate, phosphorodithioate, or methylphosphonate internucleotide linkage modifications, or the polynucleotide donor molecule includes modified nucleoside bases or modified sugars, or the polynucleotide donor molecule is labelled with a fluorescent moiety or other detectable label. In an embodiment, the polynucleotide donor molecule is double-stranded and is perfectly base-paired through all or most of its length, with the possible exception of any unpaired nucleotides at either terminus or both termini. In another embodiment, the polynucleotide donor molecule is double-stranded and includes one or more non-terminal mismatches or non-terminal unpaired nucleotides within the otherwise double-stranded duplex. In related embodiments, the polynucleotide donor molecule that is integrated at the DSB is a single-stranded DNA or a single-stranded DNA/RNA hybrid. Additional description of the polynucleotide donor molecule is found above in the paragraphs following the heading “Polynucleotide Molecules”.

[0210] In embodiments, the polynucleotide (such as a double-stranded DNA, a single-stranded DNA, a single-stranded DNA/RNA hybrid, or a double-stranded DNA/RNA hybrid) donor molecule that is integrated at the DSB includes a nucleotide sequence that, if integrated (or has sequence that is integrated) at the DSB, forms a heterologous insertion that is not normally found in the genome. In embodiments, sequence encoded by the polynucleotide molecule that is integrated at the DSB includes a nucleotide sequence that does not normally occur in the genome containing the DSB; this can be established by sequencing of the genome, or by hybridization experiments. In certain embodiments, sequence encoded by the polynucleotide molecule, when integrated at the DSB, not only permits identification of the locus of the DSB, but also imparts a functional trait to the cell including the genomic DNA, or to an organism including the cell; in non-limiting examples, sequence encoded by the polynucleotide molecule that is integrated at the DSB includes at least one of the nucleotide sequences selected from the group consisting of:
[0211] (a) DNA encoding at least one stop codon, or at least one stop codon on each strand, or at least one stop codon within each reading frame on each strand;
[0212] (b) DNA encoding heterologous primer sequence (e. g., a sequence of about 18 to about 22 contiguous nucleotides, or of at least 18, at least 20, or at least 22 contiguous nucleotides that can be used to initiate DNA polymerase activity at the site of the DSB);
[0213] (c) DNA encoding a unique identifier sequence (e. g., a sequence that when inserted at the DSB creates a heterologous sequence that can be used to identify the presence of the insertion);
[0214] (d) DNA encoding a transcript-stabilizing sequence;
[0215] (e) DNA encoding a transcript-destabilizing sequence;
[0216] (f) a DNA aptamer or DNA encoding an RNA aptamer or amino acid aptamer; and
[0217] (g) DNA that includes or encodes a sequence recognizable by a specific binding agent.
   Methods of Identifying the Nucleotide Sequence of a Locus in the Genome that is Associated with a Phenotype

[0218] In another aspect, the disclosure provides a method of identifying the nucleotide sequence of a locus in the genome that is associated with a phenotype, the method including the steps of:
[0219] (a) providing to a population of cells (such as plant cells or plant protoplasts) having the genome:
   [0220] (i) multiple different guide RNAs (gRNAs) to induce multiple different double strand breaks (DSBs) in the genome, wherein each DSB is produced by an RNA-guided nuclease guided to a locus on the genome by one of the gRNAs, and
   [0221] (ii) polynucleotide (such as a double-stranded DNA, a single-stranded DNA, a single-stranded DNA/RNA hybrid, or a double-stranded DNA/RNA hybrid) donor molecules having a defined nucleotide sequence, wherein the polynucleotide molecules are capable of being integrated (or have sequence that is integrated) into the DSBs by non-homologous end-joining (NHEJ);
[0222] whereby when sequence encoded by at least some of the polynucleotide molecules are inserted into at least some of the DSBs, a genetically heterogeneous population of cells is produced;
[0223] (b) selecting from the genetically heterogeneous population of cells a subset of cells that exhibit a phenotype of interest;
[0224] (c) using a pool of PCR primers that bind to sequence encoded by the polynucleotide molecules to amplify from the subset of cells DNA from the locus of a DSB into which sequence encoded by one of the polynucleotide molecules has been inserted; and
[0225] (d) sequencing the amplified DNA to identify the locus associated with the phenotype of interest.

[0226] In embodiments, the cells are plant cells or plant protoplasts or algal cells. In embodiments, the genetically heterogeneous population of cells undergoes one or more doubling cycles; for example, the population of cells is provided with growth conditions that should normally result in cell division, and at least some of the cells undergo one or more doublings. In embodiments, the genetically heterogeneous population of cells is subjected to conditions permitting expression of the phenotype of interest. In embodiments, the cells are provided in a single pool or population (e. g., in a single container); in other embodiments, the cells are provided in an arrayed format (e. g., in microwell plates or in droplets in a microfluidics device or attached individually to particles or beads).

[0227] In embodiments, the RNA-guided nuclease or a polynucleotide that encodes the RNA-guided nuclease is exogenously provided to the population of cells. In embodiments, each gRNA is provided as a polynucleotide composition including: (a) a CRISPR RNA (crRNA) that includes the gRNA, or a polynucleotide that encodes a crRNA, or a polynucleotide that is processed into a crRNA; or (b) a single guide RNA (sgRNA) that includes the gRNA, or a polynucleotide that encodes a sgRNA, or a polynucleotide that is processed into a sgRNA In embodiments, the multiple guide RNAs are provided as ribonucleoproteins (e. g., Cas9 nuclease molecules complexed with different gRNAs to form different RNPs). In embodiments, each gRNA is provided as a ribonucleoprotein (RNP) including the RNA-guided nuclease and an sgRNA. In embodiments, multiple guide RNAs are provided, as well as a single polynucleotide donor molecule having a sequence to be integrated at the resulting DSBs; in other embodiments, multiple guide RNAs are provided, as well as different polynucleotide donor molecules having a sequence to be integrated at the resulting multiple DSBs.

[0228] The foregoing description and the non-limiting examples presented in this disclosure illustrate the subject matter of this disclosure. Embodiments within the scope of this disclosure include those described in the following numbered lists of embodiments.

[0229] (Embodiment 1) A modified Zea sp. cell, wherein the modified cell includes a targeted modification in at least one gene selected from Table 23, or in a regulatory sequence affecting the expression of the gene. (Embodiment 2) The modified cell of embodiment 1, wherein the gene is associated with a trait, and wherein the trait is selected from the group consisting of abiotic stress, architecture, biotic stress, nutrient use efficiency, photosynthesis, resource partitioning, and senescence, and wherein the modification improves the trait in a cell including the modification relative to a cell lacking the modification, or in a plant grown from a cell including the modification relative to a plant lacking the modification. (Embodiment 3) The modified cell of embodiment 1, wherein the gene lacking the targeted modification is at least 60%, at least 65%, at least 70%, at least 75%, at least 80%, at least 85%, at least 90%, at least 91%, at least 92%, at least 93%, at least 94%, at least 95%, at least 96%, at least 97%, at least 98%, at least 99% or 100% identical to a nucleic acid sequence listed in Table 23. (Embodiment 4) The modified cell of embodiment 1, wherein the targeted gene encodes a protein, and wherein the amino acid sequence of the protein before targeting is at least 90%, at least 91%, at least 92%, at least 93%, at least 94%, at least 95%, at least 96%, at least 97%, at least 98%, at least 99% or 100% identical to the amino acid sequence of a protein listed in Table 23. (Embodiment 5) The modified cell of any of embodiments 1-4, wherein the at least one targeted modification results in increased expression of a gene; decreased expression of a gene; a change in the coding sequence of the modified gene; a change in expression or activity of the modified gene; or a change in expression, stability or activity of a protein or mRNA encoded by the modified gene. (Embodiment 6) The modified cell of any of embodiments 1-4, wherein the at least one targeted modification includes a modification selected from the group consisting of: insertion of a nucleotide sequence encoded by a polynucleotide donor molecule; deletion of genomic sequence at a double-strand break in the genome or between multiple double-strand breaks in the genome; and a change in nucleic acid or amino acid sequence. (Embodiment 7) The modified cell of embodiment 6, wherein the insertion includes or creates an upregulatory sequence. (Embodiment 8) The modified cell of embodiment 6, wherein the insertion includes or creates a down-regulatory sequence. (Embodiment 9) The modified cell of any of embodiments 1-6, wherein the modification knocks out expression of the modified gene. (Embodiment 10) The modified cell of any of embodiments 1-6, wherein the modification improves mRNA translation efficiency. (Embodiment 11) The modified cell of any of embodiments 1-6, wherein the modification results in diminished mRNA translation efficiency. (Embodiment 12) The modified cell of any of embodiments 1-6, wherein the modification is an epigenetic modification. (Embodiment 13) The modified cell of any of embodiments 1-6, wherein the modification includes the insertion or creation of at least one transcription factor binding site. (Embodiment 14) The modified cell of any of embodiments 1-6, wherein the at least one modification includes an insertion, and wherein the insertion is accompanied by the deletion of sequences from the genome of the cell. (Embodiment 15) The modified cell of any of embodiments 1-6, wherein the at least one modification includes an insertion, and wherein the insertion is in a region of the genome that is recalcitrant to meiotic or mitotic recombination. (Embodiment 16) The modified cell of any of embodiments 1-6, wherein the at least one modification is an introduced sequence selected from the following: a. a sequence encoding at least one stop codon, or at least one stop codon on each strand, or at least one stop codon within each reading frame on each strand; b. a heterologous primer sequence; c. a unique identifier sequence; d. a transcript-stabilizing sequence; e. a transcript-destabilizing sequence; f. a sequence encoding an RNA aptamer or an amino acid aptamer; and g. a sequence recognizable by a specific RNA or DNA binding agent. (Embodiment 17) The modified cell of embodiment 16, wherein the at least one modification is the introduction of a sequence recognizable by a specific binding agent, and wherein contacting the sequence with the specific binding agent results in a change of expression of a sequence of interest. (Embodiment 18) The modified cell of embodiment 17, wherein: (a) the sequence recognizable by a specific binding agent includes an auxin response element sequence, the specific binding agent is an auxin, and the change of expression is upregulation; (b) the sequence recognizable by a specific binding agent includes at least one D1-4 sequence, the specific binding agent is an auxin, and the change of expression is upregulation; (c) the sequence recognizable by a specific binding agent includes at least one DR5 sequence, the specific binding agent is an auxin, and the change of expression is upregulation; (d) the sequence recognizable by a specific binding agent includes at least one m5-DR5 sequence, the specific binding agent is an auxin, and the change of expression is upregulation; (e) the sequence recognizable by a specific binding agent includes at least one P3 sequence, the specific binding agent is an auxin, and the change of expression is upregulation; (f) the sequence recognizable by a specific binding agent includes a small RNA recognition site sequence, the specific binding agent is the corresponding small RNA, and the change of expression is downregulation; (g) the sequence recognizable by a specific binding agent includes a microRNA (miRNA) recognition site sequence, the specific binding agent is the corresponding mature miRNA, and the change of expression is downregulation; (h) the sequence recognizable by a specific binding agent includes a microRNA (miRNA) recognition site sequence for an engineered miRNA, the specific binding agent is the corresponding engineered mature miRNA, and the change of expression is downregulation; (i) the sequence recognizable by a specific binding agent includes a transposon recognition sequence, the specific binding agent is the corresponding transposon, and the change of expression is upregulation or downregulation; j) the sequence recognizable by a specific binding agent includes an ethylene-responsive element binding-factor-associated amphiphilic repression (EAR) motif sequence, the specific binding agent is ERF (ethylene-responsive element binding factor) or co-repressor, and the change of expression is downregulation; (k) the sequence recognizable by a specific binding agent includes a splice site sequence, the specific binding agent is a spliceosome, and the change of expression is expression of a spliced transcript; (1) the sequence recognizable by a specific binding agent includes a site-specific recombinase recognition site sequence, the specific binding agent is the corresponding site-specific recombinase, and the change of expression is upregulation or downregulation or expression of a transcript having an altered sequence; (m) the sequence recognizable by a specific binding agent includes sequence encoding an RNA aptamer or an RNA riboswitch, the specific binding agent is the corresponding ligand, and the change in expression is upregulation or downregulation; (n) the sequence recognizable by a specific binding agent is a hormone responsive element, the specific binding agent is a hormone, and the change in expression is upregulation or downregulation; or (o) the sequence recognizable by a specific binding agent is a transcription factor binding sequence, the specific binding agent is the corresponding transcription factor, and the change in expression is upregulation or downregulation. (Embodiment 19) The modified cell of embodiment 18, wherein the modification includes the introduction of a nucleotide sequence that encodes an RNA molecule or an amino acid sequence that is recognizable by a specific binding agent. (Embodiment 20) The modified cell of embodiment 18, wherein the modification includes the introduction of a nucleotide sequence that encodes an RNA molecule or an amino acid sequence that binds specifically to a ligand. (Embodiment 21) The modified cell of embodiment 18, wherein the modified gene encodes at least one stop codon on each strand. (Embodiment 22) The modified cell of embodiment 18, wherein the modified gene encodes at least one stop codon within each reading frame on each strand. (Embodiment 23) The modified cell of embodiment 18, wherein the modified gene encodes a transcript that is capable of forming at least partially double-stranded RNA. (Embodiment 24) The modified cell of embodiment 18, wherein the modified gene includes a nucleotide sequence that is responsive to a specific change in the physical environment, and wherein exposing the integrated polynucleotide molecule to the specific change in the physical environment results in a change of expression of a sequence of interest. (Embodiment 25) The modified cell of embodiment 24, wherein the specific change in the physical environment is at least one of: a change in light intensity or quality, a change in temperature, a change in pressure, a change in osmotic concentration, or a change in day length. (Embodiment 26) The modified cell of embodiment 25, wherein the modified gene encodes a Light-Oxygen-Voltage domain. (Embodiment 27) The modified cell of any of embodiments 1-26, wherein the modified cell includes an inserted regulatory sequence selected from the sequences listed in Table 24. (Embodiment 28) The modified cell of any of embodiments 1-27, wherein the modified Zea sp. cell is an isolated cell or protoplast. (Embodiment 29) The modified cell of any of embodiments 1-27, wherein the modified Zea sp. cell is in a Zea sp. plant, or in a zygotic or somatic embryo, seed, part, or tissue of a Zea sp. plant. (Embodiment 30) The modified cell of any of embodiments 1-27, wherein the modified Zea sp. cell is capable of division or differentiation. (Embodiment 31) The modified cell of any of embodiments 1-27, wherein the modified Zea sp. cell is haploid, diploid, or polyploid. (Embodiment 32) The modified cell of any of embodiments 1-27, wherein the modified Zea sp. cell is a meristematic cell, embryonic cell, or germline cell. (Embodiment 33) The modified cell of any of embodiments 1-32, wherein the modification is determined relative to a parent plant cell, and wherein the modified plant cell is devoid of mitotically or meiotically generated genetic or epigenetic changes relative to the parent plant cell. (Embodiment 34) The modified cell of any of embodiments 1-26, wherein the modified cell includes an inserted regulatory sequence selected from the sequences listed in Table 24. (Embodiment 35) A modified Zea sp. cell, wherein the modified cell includes an inserted regulatory sequence selected from the sequences listed in Table 24. (Embodiment 36) A modified Zea sp. cell, wherein the modified cell includes two or more targeted modifications, wherein at least one of said targeted modifications occurs in a gene selected from the list of genes in Table 23 or in a regulatory sequence affecting the expression of the gene. (Embodiment 37) The modified cell of embodiment 36, wherein the gene is associated with a trait, and wherein the trait is selected from the group consisting of abiotic stress, architecture, biotic stress, nutrient use efficiency, photosynthesis, resource partitioning, and senescence, and wherein the modification improves the trait in a cell including the modification relative to a cell lacking the modification, or in a plant grown from a cell including the modification relative to a plant lacking the modification. (Embodiment 38) The modified cell of embodiment 36, wherein a targeted gene, before modification, is at least 60%, at least 65%, at least 70%, at least 75%, at least 80%, at least 85%, at least 90%, at least 91%, at least 92%, at least 93%, at least 94%, at least 95%, at least 96%, at least 97%, at least 98%, at least 99% or 100% identical to a nucleic acid sequence listed in Table 23. (Embodiment 39) The modified cell of embodiment 36, wherein a targeted gene encodes a protein, and wherein the amino acid sequence of the encoded protein before targeting is at least 90%, at least 91%, at least 92%, at least 93%, at least 94%, at least 95%, at least 96%, at least 97%, at least 98%, at least 99% or 100% identical to the amino acid sequence of a protein listed in Table 23. (Embodiment 40) The modified cell of any of embodiments 36-39, wherein the targeted modifications result in increased expression of a gene; decreased expression of a gene; a change in the coding sequence of the modified gene; a change in expression or activity of the modified gene; or a change in expression, stability or activity of a protein or mRNA encoded by the modified gene. (Embodiment 41) The modified cell of any of embodiments 36-39, wherein the targeted modifications includes a modification selected from the group consisting of: insertion of a nucleotide sequence encoded by a polynucleotide donor molecule; deletion of genomic sequence at a double-strand break in the genome or between multiple double-strand breaks in the genome; and a change in nucleic acid or amino acid sequence. (Embodiment 42) The modified cell of embodiment 41, wherein the insertion includes or creates an upregulatory sequence. (Embodiment 43) The modified cell of embodiment 41, wherein the insertion includes or creates a down-regulatory sequence. (Embodiment 44) The modified cell of any of embodiments 36-41, wherein at least one the modifications knocks out expression of the modified gene. (Embodiment 45) The modified cell of any of embodiments 36-41, wherein at least one of the modifications improves mRNA translation efficiency. (Embodiment 46) The modified cell of any of embodiments 36-41, wherein at least one of the modifications results in diminished mRNA translation efficiency. (Embodiment 47) The modified cell of any of embodiments 36-41, wherein at least one of the modifications is an epigenetic modification. (Embodiment 48) The modified cell of any of embodiments 36-41, wherein at least one of the modifications includes the insertion or creation of at least one transcription factor binding site. (Embodiment 49) The modified cell of any of embodiments 36-41, wherein at least one of the modifications includes an insertion, and wherein the insertion is accompanied by the deletion of sequences from the genome of the cell. (Embodiment 50) The modified cell of any of embodiments 36-41, wherein at least one of the modifications includes an insertion, and wherein the insertion is in a region of the genome that is recalcitrant to meiotic or mitotic recombination. (Embodiment 51) The modified cell of any of embodiments 36-41, wherein at least one of the modifications is an introduced sequence selected from the following: a. a sequence encoding at least one stop codon, or at least one stop codon on each strand, or at least one stop codon within each reading frame on each strand; b. a heterologous primer sequence; c. a unique identifier sequence; d. a transcript-stabilizing sequence; e. a transcript-destabilizing sequence; f. a sequence encoding an RNA aptamer or an amino acid aptamer; and g. a sequence recognizable by a specific RNA or DNA binding agent. (Embodiment 52) The modified cell of embodiment 51, wherein at least one of the modifications is the introduction of a sequence recognizable by a specific binding agent, and wherein contacting the sequence with the specific binding agent results in a change of expression of a sequence of interest. (Embodiment 53) The modified cell of embodiment 52, wherein: (a) the sequence recognizable by a specific binding agent includes an auxin response element sequence, the specific binding agent is an auxin, and the change of expression is upregulation; (b) the sequence recognizable by a specific binding agent includes at least one D1-4 sequence, the specific binding agent is an auxin, and the change of expression is upregulation; (c) the sequence recognizable by a specific binding agent includes at least one DR5 sequence, the specific binding agent is an auxin, and the change of expression is upregulation; (d) the sequence recognizable by a specific binding agent includes at least one m5-DR5 sequence, the specific binding agent is an auxin, and the change of expression is upregulation; (e) the sequence recognizable by a specific binding agent includes at least one P3 sequence, the specific binding agent is an auxin, and the change of expression is upregulation; (f) the sequence recognizable by a specific binding agent includes a small RNA recognition site sequence, the specific binding agent is the corresponding small RNA, and the change of expression is downregulation; (g) the sequence recognizable by a specific binding agent includes a microRNA (miRNA) recognition site sequence, the specific binding agent is the corresponding mature miRNA, and the change of expression is downregulation; (h) the sequence recognizable by a specific binding agent includes a microRNA (miRNA) recognition site sequence for an engineered miRNA, the specific binding agent is the corresponding engineered mature miRNA, and the change of expression is downregulation; (i) the sequence recognizable by a specific binding agent includes a transposon recognition sequence, the specific binding agent is the corresponding transposon, and the change of expression is upregulation or downregulation; (j) the sequence recognizable by a specific binding agent includes an ethylene-responsive element binding-factor-associated amphiphilic repression (EAR) motif sequence, the specific binding agent is ERF (ethylene-responsive element binding factor) or co-repressor, and the change of expression is downregulation; (k) the sequence recognizable by a specific binding agent includes a splice site sequence, the specific binding agent is a spliceosome, and the change of expression is expression of a spliced transcript; (1) the sequence recognizable by a specific binding agent includes a site-specific recombinase recognition site sequence, the specific binding agent is the corresponding site-specific recombinase, and the change of expression is upregulation or downregulation or expression of a transcript having an altered sequence; (m) the sequence recognizable by a specific binding agent includes sequence encoding an RNA aptamer or an RNA riboswitch, the specific binding agent is the corresponding ligand, and the change in expression is upregulation or downregulation; (n) the sequence recognizable by a specific binding agent is a hormone responsive element, the specific binding agent is a hormone, and the change in expression is upregulation or downregulation; or (o) the sequence recognizable by a specific binding agent is a transcription factor binding sequence, the specific binding agent is the corresponding transcription factor, and the change in expression is upregulation or downregulation. (Embodiment 54) The modified cell of embodiment 53, wherein at least one modification includes the introduction of a nucleotide sequence that encodes an RNA molecule or an amino acid sequence that is recognizable by a specific binding agent. (Embodiment 55) The modified cell of embodiment 53, wherein at least one modification includes the introduction of a nucleotide sequence that encodes an RNA molecule or an amino acid sequence that binds specifically to a ligand. (Embodiment 56) The modified cell of embodiment 53, wherein the modified gene encodes at least one stop codon on each strand. (Embodiment 57) The modified cell of embodiment 53, wherein the modified gene encodes at least one stop codon within each reading frame on each strand. (Embodiment 58) The modified cell of embodiment 53, wherein the modified gene encodes a transcript that is capable of forming at least partially double-stranded RNA. (Embodiment 59) The modified cell of embodiment 53, wherein the modified gene includes a nucleotide sequence that is responsive to a specific change in the physical environment, and wherein exposing the integrated polynucleotide molecule to the specific change in the physical environment results in a change of expression of a sequence of interest. (Embodiment 60) The modified cell of embodiment 59, wherein the specific change in the physical environment is at least one of: a change in light intensity or quality, a change in temperature, a change in pressure, a change in osmotic concentration, or a change in day length. (Embodiment 61) The modified cell of embodiment 60, wherein the modified gene encodes a Light-Oxygen-Voltage domain. (Embodiment 62) The modified cell of any of embodiments 36-61, wherein the modified cell includes an inserted regulatory sequence selected from the sequences listed in Table 24. (Embodiment 63) The modified cell of any of embodiments 36-62, wherein the modified Zea sp. cell is an isolated cell or protoplast. (Embodiment 64) The modified cell of any of embodiments 36-62, wherein the modified Zea sp. cell is in a Zea sp. plant, or in a zygotic or somatic embryo, seed, part, or tissue of a Zea sp. plant. (Embodiment 65) The modified cell of any of embodiments 36-62, wherein the modified Zea sp. cell is capable of division or differentiation. (Embodiment 66) The modified cell of any of embodiments 36-62, wherein the modified Zea sp. cell is haploid, diploid, or polyploid. (Embodiment 67) The modified cell of any of embodiments 36-62, wherein the modified Zea sp. cell is a meristematic cell, embryonic cell, or germline cell. (Embodiment 68) The modified cell of any of embodiments 36-67, wherein the modifications are determined relative to a parent plant cell, and wherein the modified plant cell is devoid of mitotically or meiotically generated genetic or epigenetic changes relative to the parent plant cell. (Embodiment 69) A modified Zea sp. cell, wherein the modified cell includes two or more targeted modifications, wherein a first targeted modification occurs in a first gene from Table 23, and wherein a second modification occurs in second gene from Table 23, and wherein said modifications are associated with different traits. (Embodiment 70) The modified cell of embodiment 69, wherein the traits are selected from the group consisting of abiotic stress, architecture, biotic stress, nutrient use efficiency, photosynthesis, resource partitioning, and senescence, and wherein the modification improves the traits in a cell including the modification relative to a cell lacking the modification, or in a plant grown from a cell including the modification relative to a plant lacking the modification. (Embodiment 71) The modified cell of embodiment 69, wherein at least one of the targeted genes, before modification, is at least 60%, at least 65%, at least 70%, at least 75%, at least 80%, at least 85%, at least 90%, at least 91%, at least 92%, at least 93%, at least 94%, at least 95%, at least 96%, at least 97%, at least 98%, at least 99% or 100% identical to a nucleic acid sequence listed in Table 23. (Embodiment 72) The modified cell of embodiment 69, wherein at least one of the targeted genes encodes a protein, and wherein the amino acid sequence of the protein before targeting is at least 90%, at least 91%, at least 92%, at least 93%, at least 94%, at least 95%, at least 96%, at least 97%, at least 98%, at least 99% or 100% identical to the amino acid sequence of a protein listed in Table 23. (Embodiment 73) The modified cell of any of embodiments 69-72, wherein the targeted modifications result in increased expression of a gene; decreased expression of a gene; a change in the coding sequence of the modified gene; a change in expression or activity of the modified gene; or a change in expression, stability or activity of a protein or mRNA encoded by the modified gene. (Embodiment 74) The modified cell of any of embodiments 69-72, wherein the targeted modifications includes a modification selected from the group consisting of: insertion of a nucleotide sequence encoded by a polynucleotide donor molecule; deletion of genomic sequence at a double-strand break in the genome or between multiple double-strand breaks in the genome; and a change in nucleic acid or amino acid sequence. (Embodiment 75) The modified cell of embodiment 74, wherein the insertion includes or creates an upregulatory sequence. (Embodiment 76) The modified cell of embodiment 74, wherein the insertion includes or creates a down-regulatory sequence. (Embodiment 77) The modified cell of any of embodiments 69-74, wherein at least one the modifications knocks out expression of the modified gene. (Embodiment 78) The modified cell of any of embodiments 69-74, wherein at least one of the modifications improves mRNA translation efficiency. (Embodiment 79) The modified cell of any of embodiments 69-74, wherein at least one of the modifications results in diminished mRNA translation efficiency. (Embodiment 80) The modified cell of any of embodiments 69-74, wherein at least one of the modifications is an epigenetic modification. (Embodiment 81) The modified cell of any of embodiments 69-74, wherein at least one of the modifications includes the insertion or creation of at least one transcription factor binding site. (Embodiment 82) The modified cell of any of embodiments 69-74, wherein at least one of the modifications includes an insertion, and wherein the insertion is accompanied by the deletion of sequences from the genome of the cell. (Embodiment 83) The modified cell of any of embodiments 69-74, wherein at least one of the modifications includes an insertion, and wherein the insertion is in a region of the genome that is recalcitrant to meiotic or mitotic recombination. (Embodiment 84) The modified cell of any of embodiments 69-74, wherein at least one of the modifications is an introduced sequence selected from the following: a. a sequence encoding at least one stop codon, or at least one stop codon on each strand, or at least one stop codon within each reading frame on each strand; b. a heterologous primer sequence; c. a unique identifier sequence; d. a transcript-stabilizing sequence; e. a transcript-destabilizing sequence; f. a sequence encoding an RNA aptamer or an amino acid aptamer; and g. a sequence recognizable by a specific RNA or DNA binding agent. (Embodiment 85) The modified cell of embodiment 84 wherein at least one of the modifications is the introduction of a sequence recognizable by a specific binding agent, and wherein contacting the sequence with the specific binding agent results in a change of expression of a sequence of interest. (Embodiment 86) The modified cell of embodiment 85 wherein: (a) the sequence recognizable by a specific binding agent includes an auxin response element sequence, the specific binding agent is an auxin, and the change of expression is upregulation; (b) the sequence recognizable by a specific binding agent includes at least one D1-4 sequence, the specific binding agent is an auxin, and the change of expression is upregulation; (c) the sequence recognizable by a specific binding agent includes at least one DR5 sequence, the specific binding agent is an auxin, and the change of expression is upregulation; (d) the sequence recognizable by a specific binding agent includes at least one m5-DR5 sequence, the specific binding agent is an auxin, and the change of expression is upregulation; (e) the sequence recognizable by a specific binding agent includes at least one P3 sequence, the specific binding agent is an auxin, and the change of expression is upregulation; (f) the sequence recognizable by a specific binding agent includes a small RNA recognition site sequence, the specific binding agent is the corresponding small RNA, and the change of expression is downregulation; (g) the sequence recognizable by a specific binding agent includes a microRNA (miRNA) recognition site sequence, the specific binding agent is the corresponding mature miRNA, and the change of expression is downregulation; (h) the sequence recognizable by a specific binding agent includes a microRNA (miRNA) recognition site sequence for an engineered miRNA, the specific binding agent is the corresponding engineered mature miRNA, and the change of expression is downregulation; (i) the sequence recognizable by a specific binding agent includes a transposon recognition sequence, the specific binding agent is the corresponding transposon, and the change of expression is upregulation or downregulation; (j) the sequence recognizable by a specific binding agent includes an ethylene-responsive element binding-factor-associated amphiphilic repression (EAR) motif sequence, the specific binding agent is ERF (ethylene-responsive element binding factor) or co-repressor, and the change of expression is downregulation; (k) the sequence recognizable by a specific binding agent includes a splice site sequence, the specific binding agent is a spliceosome, and the change of expression is expression of a spliced transcript; (1) the sequence recognizable by a specific binding agent includes a site-specific recombinase recognition site sequence, the specific binding agent is the corresponding site-specific recombinase, and the change of expression is upregulation or downregulation or expression of a transcript having an altered sequence; (m) the sequence recognizable by a specific binding agent includes sequence encoding an RNA aptamer or an RNA riboswitch, the specific binding agent is the corresponding ligand, and the change in expression is upregulation or downregulation; (n) the sequence recognizable by a specific binding agent is a hormone responsive element, the specific binding agent is a hormone, and the change in expression is upregulation or downregulation; or (o) the sequence recognizable by a specific binding agent is a transcription factor binding sequence, the specific binding agent is the corresponding transcription factor, and the change in expression is upregulation or downregulation. (Embodiment 87) The modified cell of embodiment 86, wherein at least one modification includes the introduction of a nucleotide sequence that encodes an RNA molecule or an amino acid sequence that is recognizable by a specific binding agent. (Embodiment 88) The modified cell of embodiment 86, wherein at least one modification includes the introduction of a nucleotide sequence that encodes an RNA molecule or an amino acid sequence that binds specifically to a ligand. (Embodiment 89) The modified cell of embodiment 86, wherein the modified gene encodes at least one stop codon on each strand. (Embodiment 90) The modified cell of embodiment 86, wherein the modified gene encodes at least one stop codon within each reading frame on each strand. (Embodiment 91) The modified cell of embodiment 86, wherein the modified gene encodes a transcript that is capable of forming at least partially double-stranded RNA. (Embodiment 92) The modified cell of embodiment 86, wherein the modified gene includes a nucleotide sequence that is responsive to a specific change in the physical environment, and wherein exposing the integrated polynucleotide molecule to the specific change in the physical environment results in a change of expression of a sequence of interest. (Embodiment 93) The modified cell of embodiment 92, wherein the specific change in the physical environment is at least one of: a change in light intensity or quality, a change in temperature, a change in pressure, a change in osmotic concentration, or a change in day length. (Embodiment 94) The modified cell of embodiment 93, wherein the modified gene encodes a Light-Oxygen-Voltage domain. (Embodiment 95) The modified cell of any of embodiments 69-94, wherein the modified cell includes an inserted regulatory sequence selected from the sequences listed in Table 24. (Embodiment 96) The modified cell of any of embodiments 69-95, wherein the modified Zea sp. cell is an isolated cell or protoplast. (Embodiment 97) The modified cell of any of embodiments 69-95, wherein the modified Zea sp. cell is in a Zea sp. plant, or in a zygotic or somatic embryo, seed, part, or tissue of a Zea sp. plant. (Embodiment 98) The modified cell of any of embodiments 69-95, wherein the modified Zea sp. cell is capable of division or differentiation. (Embodiment 99) The modified cell of any of embodiments 69-95, wherein the modified Zea sp. cell is haploid, diploid, or polyploid. (Embodiment 100) The modified cell of any of embodiments 69-95, wherein the modified Zea sp. cell is a meristematic cell, embryonic cell, or germline cell. (Embodiment 101) The modified cell of any of embodiments 69-100, wherein the modifications are determined relative to a parent plant cell, and wherein the modified plant cell is devoid of mitotically or meiotically generated genetic or epigenetic changes relative to the parent plant cell. (Embodiment 102) A method of modifying a Zea sp. cell by creating a plurality of targeted modifications in the genome of the cell, including: contacting the genome with one or more targeting agents, wherein the one or more agents include or encode predetermined peptide or nucleic acid sequences, wherein the predetermined peptide or nucleic acid sequences bind preferentially at or near predetermined target sites within the plant genome, and wherein the binding facilitates the generation of the plurality of targeted modifications within the genome; wherein the plurality of targeted modifications occurs without an intervening step of separately identifying an individual modification and without a step of separately selecting for the occurrence of an individual modification among the plurality of targeted modifications mediated by the targeting agents; and wherein the targeted modifications alter at least one trait of the plant cell, or at least one trait of a plant including the plant cell, or at least one trait of a plant grown from the plant cell, or result in a detectable phenotype in the modified plant cell; and wherein at least two of the targeted modifications are insertions of predetermined sequences encoded by one or more polynucleotide donor molecules, and wherein at least one of the polynucleotide donor molecules lacks homology to the genome sequences adjacent to the site of insertion; and wherein at least one of the targeted modifications is directed to a gene listed in Table 23. (Embodiment 103) The method of embodiment 102, wherein at least one of the polynucleotide donor molecules is a single stranded DNA molecule, a single stranded RNA molecule, a single stranded DNA-RNA hybrid molecule, or a duplex RNA-DNA molecule. (Embodiment 104) The method of embodiment 102 or 103, wherein the modified plant cell is a meristematic cell, embryonic cell, or germline cell. (Embodiment 105) The method of any of embodiments 102, 103 or 104, wherein repetition of the method results in an efficiency of at least 1%, wherein said efficiency is determined by dividing the number of successfully targeted cells by the total number of cells targeted. (Embodiment 106) A method of modifying a Zea sp. cell by creating a plurality of targeted modifications in the genome of the cell, including: contacting the genome with one or more targeting agents, wherein the one or more agents include or encode predetermined peptide or nucleic acid sequences, wherein the predetermined peptide or nucleic acid sequences bind preferentially at or near predetermined target sites within the plant genome, and wherein the binding facilitates the generation of the plurality of targeted modifications within the genome; wherein the plurality of targeted modifications occurs without an intervening step of separately identifying an individual modification and without a step of separately selecting for the occurrence of an individual modification among the plurality of targeted modifications mediated by the targeting agents; wherein the targeted modifications improve at least one trait of the plant cell, or at least one trait of a plant including the plant cell, or at least one trait of a plant grown from the plant cell, or result in a detectable phenotype in the modified plant cell; and wherein at least one of the targeted modifications is an insertion of a predetermined sequence encoded by one or more polynucleotide donor molecules, and wherein at least one of the polynucleotide donor molecules is a single stranded DNA molecule, a single stranded RNA molecule, a single stranded DNA-RNA hybrid molecule, or a duplex RNA-DNA molecule and wherein at least one of the targeted modifications is directed to a gene listed in Table 23. (Embodiment 107) The method of embodiment 106, wherein at least one of the polynucleotide donor molecules lacks homology to the genome sequences adjacent to the site of insertion. (Embodiment 108) The method of embodiments 106 or 107, wherein the modified plant cell is a meristematic cell, embryonic cell, or germline cell. (Embodiment 109) The method of any of embodiments 106, 107, or 108, wherein repetition of the method results in an efficiency of at least 1%, wherein said efficiency is determined by dividing the number of successfully targeted cells by the total number of cells targeted. (Embodiment 110) A method of modifying a Zea sp. cell by creating a plurality of targeted modifications in the genome of the plant cell, including: contacting the genome with one or more targeting agents, wherein the one or more agents include or encode predetermined peptide or nucleic acid sequences, wherein the predetermined peptide or nucleic acid sequences bind preferentially at or near predetermined target sites within the plant genome, and wherein the binding facilitates the generation of the plurality of targeted modifications within the genome; wherein the plurality of modifications occurs without an intervening step of separately identifying an individual modification and without a step of separately selecting for the occurrence of an individual modification among the plurality of targeted modifications mediated by the targeting agents; and wherein the targeted modifications improve at least one trait of the plant cell, or at least one trait of a plant including the plant cell, or at least one trait of a plant or seed obtained from the plant cell, or result in a detectable phenotype in the modified plant cell; and wherein the modified plant cell is a meristematic cell, embryonic cell, or germline cell; and wherein at least one of the targeted modifications is directed to a gene listed in Table 23. (Embodiment 111) The method of embodiment 110, wherein at least one of the targeted modifications is an insertion of a predetermined sequence encoded by one or more polynucleotide donor molecules, and wherein at least one of the polynucleotide donor molecules is a single stranded DNA molecule, a single stranded RNA molecule, a single stranded DNA-RNA hybrid molecule, or a duplex RNA-DNA molecule. (Embodiment 112) The method of embodiment 110 or 111, wherein at least one of the polynucleotide donor molecules lacks homology to the genome sequences adjacent to the site of insertion. (Embodiment 113) The method of any of embodiments 110, 111, or 112, wherein repetition of the method results in an efficiency of at least 1%, wherein said efficiency is determined by dividing the number of successfully targeted cells by the total number of cells targeted. (Embodiment 114) A method of modifying a Zea sp. cell by creating a plurality of targeted modifications in the genome of the cell, including: contacting the genome with one or more targeting agents, wherein the one or more agents include or encode predetermined peptide or nucleic acid sequences, wherein the predetermined peptide or nucleic acid sequences bind preferentially at or near predetermined target sites within the plant genome, and wherein the binding facilitates the generation of the plurality of targeted modifications within the genome; wherein the plurality of modifications occurs without an intervening step of separately identifying an individual modification and without a step of separately selecting for the occurrence of an individual modification among the plurality of targeted modifications mediated by the targeting agents; and wherein the targeted modifications improve at least one trait of the plant cell, or at least one trait of a plant including the plant cell, or at least one trait of a plant or seed obtained from the plant cell, or result in a detectable phenotype in the modified plant cell; and wherein repetition of the aforementioned steps results in an efficiency of at least 1%, wherein said efficiency is determined by dividing the number of successfully targeted cells by the total number of cells targeted; and wherein at least one of the targeted modifications is directed to a gene listed in Table 23. (Embodiment 115) The method of embodiment 114, wherein the modified plant cell is a meristematic cell, embryonic cell, or germline cell. (Embodiment 116) The method of embodiment 114 or 115, wherein at least one of the targeted modifications is an insertion of a predetermined sequence encoded by one or more polynucleotide donor molecules, and wherein at least one of the polynucleotide donor molecules is a single stranded DNA molecule, a single stranded RNA molecule, a single stranded DNA-RNA hybrid molecule, or a duplex RNA-DNA molecule. (Embodiment 117) The method of any of embodiments 114, 115, or 116, wherein at least one of the polynucleotide donor molecules lacks homology to the genome sequences adjacent to the site of insertion. (Embodiment 118) The method of any of embodiments 102-117, wherein at least one of the targeted modifications is an insertion between 3 and 400 nucleotides in length, between 10 and 350 nucleotides in length, between 18 and 350 nucleotides in length, between 18 and 200 nucleotides in length, between 10 and 150 nucleotides in length, or between 11 and 100 nucleotides in length. (Embodiment 119) The method of embodiment 118, wherein two of the targeted modifications are insertions between 10 and 350 nucleotides in length, between 18 and 350 nucleotides in length, between 18 and 200 nucleotides in length, between 10 and 150 nucleotides in length, or between 11 and 100 nucleotides in length. (Embodiment 120) The method of any of embodiments 102-119, including at least two insertions, wherein at least one of the insertions is an upregulatory sequence. (Embodiment 121) The method of any of embodiments 102-119 wherein at least one of the insertions is a regulatory sequence listed in Table 24. (Embodiment 122) The method of any of embodiments 102-119, including the insertion or creation of at least one transcription factor binding site. (Embodiment 123) The method of any of embodiments 102-122, including the insertion or insertions of predetermined sequences, wherein the insertion or insertions of predetermined sequences are accompanied by the deletion of sequences from the plant genome. (Embodiment 124) The method of any of embodiments 102-123 further including obtaining a plant from the modified plant cell and breeding the plant. (Embodiment 125) The method of any of embodiments 102-123, further including a step of introducing additional genetic or epigenetic changes into the modified plant cell or into a plant grown from the modified plant cell. (Embodiment 126) The method of any of embodiments 102-125, including introducing at least two targeted insertions, wherein at least two of the targeted insertions independently up- or down-regulate the expression of two or more distinct genes. (Embodiment 127) The method of any of embodiments 102-126, wherein the donor polynucleotide is tethered to a crRNA by a covalent bond, a non-covalent bond, or a combination of covalent and non-covalent bonds. (Embodiment 128) The method of any of embodiments 102-127, wherein a loss of epigenetic marks after modification occurs in less than 0.01% of the genome. (Embodiment 129) The method of any of embodiments 102-127, wherein the genome of the modified plant cell is more than 99.9% identical to the genome of the parent cell. (Embodiment 130) The method of any of embodiments 102-129, wherein at least one of the targeted modifications is an insertion, and wherein at least one insertion is in a region of the genome that is recalcitrant to meiotic or mitotic recombination. (Embodiment 131) The method of any of embodiments 102-130, wherein the cell is a member of a pool of cells being targeted, and wherein the modified cells within the pool are characterized by sequencing after targeting. (Embodiment 132) The method of any of embodiments 102-131, wherein at least one DSB is introduced into the genome by at least one of the group consisting of: (a) a nuclease selected from the group consisting of an RNA-guided nuclease, an RNA-guided DNA endonuclease, a type II Cas nuclease, a Cas9, a type V Cas nuclease, a Cpf1 (Cas12a) nuclease, a CasY (Cas12d) nuclease, a CasX (Cas12e) nuclease, a C2c1 nuclease, a C2c3 nuclease, Cas12f nuclease, Cas12i nuclease, Cas12j nuclease, an engineered nuclease, a codon-optimized nuclease, a zinc-finger nuclease (ZFN), a transcription activator-like effector nuclease (TAL-effector nuclease), an Argonaute, a meganuclease, an engineered meganuclease, a recombinase, integrase, and a transposase; (b) a polynucleotide encoding one or more nucleases capable of effecting site-specific alteration of a target nucleotide sequence; and (c) a guide RNA (gRNA) for an RNA-guided nuclease, and a DNA encoding a gRNA for an RNA-guided nuclease. (Embodiment 133) The method of any of embodiments 102-131, wherein at least one DSB is introduced into the genome by at least one at least one treatment selected from the group consisting of: (a) bacterially mediated (e.g., Agrobacterium sp., Rhizobium sp., Sinorhizobium sp., Mesorhizobium sp., Bradyrhizobium sp., Azobacter sp., Phyllobacterium sp.) transfection; (b) Biolistics or particle bombardment; (c) treatment with at least one chemical, enzymatic, or physical agent; and (d) application of heat or cold, ultrasonication, centrifugation, positive or negative pressure, cell wall or membrane disruption or deformation, or electroporation. (Embodiment 134) The method of any of embodiments 102-133, wherein at least one DSB is introduced in the genome: (a) within a sequence of interest, (b) upstream of a sequence of interest, or (c) downstream of a sequence of interest. (Embodiment 135) The method of embodiment 134, wherein a polynucleotide molecule, when integrated into the genome, is functionally or operably linked to the sequence of interest. (Embodiment 136) The method of embodiment 135, wherein the sequence of interest includes coding sequence, non-coding sequence, or a combination of coding and non-coding sequence. (Embodiment 137) The method of embodiment 134, wherein the at least one DSB is two or more DSBs. (Embodiment 138) The method of embodiment 137, wherein the polynucleotide molecule that is integrated into each of the two or more DSBs is (a) identical, or (b) different, for each of the DSBs. (Embodiment 139) The method of 135, wherein the polynucleotide molecule includes at least one of the nucleotide sequences selected from the group consisting of: (a) DNA or RNA encoding at least one stop codon, or at least one stop codon on each strand, or at least one stop codon within each reading frame on each strand; (b) DNA or RNA encoding heterologous primer sequence; (c) DNA or RNA encoding a unique identifier sequence; (d) DNA or RNA encoding a transcript-stabilizing sequence; (e) DNA or RNA encoding a transcript-destabilizing sequence; (f) a DNA or RNA aptamer, or DNA encoding an RNA aptamer, or DNA or RNA encoding an amino acid aptamer; and (g) DNA or RNA encoding a sequence recognizable by a specific binding agent. (Embodiment 140) The method of embodiment 135 wherein the polynucleotide molecule includes DNA or RNA encoding a sequence recognizable by a specific binding agent, and wherein contacting the integrated polynucleotide molecule with the specific binding agent results in a change of expression of the sequence of interest. (Embodiment 141) The method of embodiment 140 wherein: (a) the sequence recognizable by a specific binding agent includes an auxin response element sequence, the specific binding agent is an auxin, and the change of expression is upregulation; (b) the sequence recognizable by a specific binding agent includes at least one D1-4 sequence, the specific binding agent is an auxin, and the change of expression is upregulation; (c) the sequence recognizable by a specific binding agent includes at least one DR5 sequence, the specific binding agent is an auxin, and the change of expression is upregulation; (d) the sequence recognizable by a specific binding agent includes at least one m5-DR5 sequence, the specific binding agent is an auxin, and the change of expression is upregulation; (e) the sequence recognizable by a specific binding agent includes at least one P3 sequence, the specific binding agent is an auxin, and the change of expression is upregulation; (f) the sequence recognizable by a specific binding agent includes a small RNA recognition site sequence, the specific binding agent is the corresponding small RNA, and the change of expression is downregulation; (g) the sequence recognizable by a specific binding agent includes a microRNA (miRNA) recognition site sequence, the specific binding agent is the corresponding mature miRNA, and the change of expression is downregulation; (h) the sequence recognizable by a specific binding agent includes a microRNA (miRNA) recognition site sequence for an engineered miRNA, the specific binding agent is the corresponding engineered mature miRNA, and the change of expression is downregulation; (i) the sequence recognizable by a specific binding agent includes a transposon recognition sequence, the specific binding agent is the corresponding transposon, and the change of expression is upregulation or downregulation; (i) the sequence recognizable by a specific binding agent includes an ethylene-responsive element binding-factor-associated amphiphilic repression (EAR) motif sequence, the specific binding agent is ERF (ethylene-responsive element binding factor) or co-repressor, and the change of expression is downregulation; (k) the sequence recognizable by a specific binding agent includes a splice site sequence, the specific binding agent is a spliceosome, and the change of expression is expression of a spliced transcript; (1) the sequence recognizable by a specific binding agent includes a site-specific recombinase recognition site sequence, the specific binding agent is the corresponding site-specific recombinase, and the change of expression is upregulation or downregulation or expression of a transcript having an altered sequence; (m) the sequence recognizable by a specific binding agent includes sequence encoding an RNA aptamer or an RNA riboswitch, the specific binding agent is the corresponding ligand, and the change in expression is upregulation or downregulation; (n) the sequence recognizable by a specific binding agent is a hormone responsive element, the specific binding agent is a hormone, and the change in expression is upregulation or downregulation; or (o) the sequence recognizable by a specific binding agent is a transcription factor binding sequence, the specific binding agent is the corresponding transcription factor, and the change in expression is upregulation or downregulation. (Embodiment 142) The method of embodiment 140 wherein the polynucleotide molecule includes a nucleotide sequence that encodes an RNA molecule or an amino acid sequence that is recognizable by a specific binding agent. (Embodiment 143) The method of embodiment 140, wherein the polynucleotide molecule includes a nucleotide sequence that encodes an RNA molecule or an amino acid sequence that binds specifically to a ligand. (Embodiment 144) The method of embodiment 139, wherein the polynucleotide molecule encodes at least one stop codon on each strand. (Embodiment 145) The method of embodiment 139, wherein the polynucleotide molecule encodes at least one stop codon within each reading frame on each strand. (Embodiment 146) The method of embodiment 139, wherein the polynucleotide molecule includes at least partially self-complementary sequence, such that the polynucleotide molecule encodes a transcript that is capable of forming at least partially double-stranded RNA. (Embodiment 147) The method of embodiment 139 wherein the polynucleotide molecule includes a nucleotide sequence that is responsive to a specific change in the physical environment, and wherein exposing the integrated polynucleotide molecule to the specific change in the physical environment results in a change of expression of the sequence of interest. (Embodiment 148) The method of embodiment 147, wherein the specific change in the physical environment is at least one of: a change in light intensity or quality, a change in temperature, a change in pressure, a change in osmotic concentration, or a change in day length. (Embodiment 149) The method of embodiment 139, wherein the polynucleotide molecule includes a nucleotide sequence encoding an RNA molecule or an amino acid sequence that is responsive to a specific change in the physical environment. (Embodiment 150) The method of embodiment 149, wherein the polynucleotide molecule encodes a Light-Oxygen-Voltage domain. (Embodiment 151) The method of embodiment 132, wherein each gRNA is provided as a polynucleotide composition including: (a) a CRISPR RNA (crRNA) that includes the gRNA, or a polynucleotide that encodes a crRNA, or a polynucleotide that is processed into a crRNA; or (b) a single guide RNA (sgRNA) that includes the gRNA, or a polynucleotide that encodes a sgRNA, or a polynucleotide that is processed into a sgRNA. (Embodiment 152) The method of embodiment 151, wherein each gRNA is provided as a ribonucleoprotein (RNP) including the RNA-guided nuclease and an sgRNA. (Embodiment 153) The method of embodiment 134, wherein: (a) the at least one DSB is two blunt-ended DSBs, resulting in deletion of genomic sequence between the two blunt-ended DSBs, and wherein the polynucleotide molecule is selected from the group consisting of a blunt-ended double-stranded DNA, a single-stranded DNA, a single-stranded DNA/RNA hybrid, and a blunt-ended double-stranded DNA/RNA hybrid and is integrated into the genome between the two blunt-ended DSBs; (b) the at least one DSB is two DSBs, wherein the first DSB is blunt-ended and the second DSB has an overhang, resulting in deletion of genomic sequence between the two DSBs, and wherein the polynucleotide molecule is a double-stranded DNA or double-stranded DNA/RNA hybrid that is blunt-ended at one terminus and has an overhang on the other terminus, or is a single-stranded DNA or a single-stranded DNA/RNA hybrid, and is integrated into the genome between the two DSBs; wherein the at least one DSB is two DSBs, each having an overhang, resulting in deletion of genomic sequence between the two DSBs, and wherein the polynucleotide molecule is a double-stranded DNA or double-stranded DNA/RNA hybrid that has an overhang at each terminus or is a single-stranded DNA or a single-stranded DNA/RNA hybrid, and is integrated into the genome between the two DSBs. (Embodiment 154) A modified Zea sp. cell resulting from the method of any embodiments 102-153. (Embodiment 155) A modified Zea sp. plant grown from a modified plant cell of embodiment 154. (Embodiment 156) The modified Zea sp. cell of embodiment 16, wherein the modified plant cell includes at least two precise and separately targeted insertions in its genome, wherein the insertions are determined relative to a parent plant cell, and wherein the modified plant cell is devoid of mitotically or meiotically generated genetic or epigenetic changes relative to the parent plant cell. (Embodiment 157) A modified Zea sp. cell, wherein the modified plant cell includes at least two precise and separately targeted insertions in its genome, wherein the insertions are determined relative to a parent plant cell, and wherein the modified plant cell is devoid of mitotically or meiotically generated genetic or epigenetic changes relative to the parent plant cell, and wherein at least one of the insertions regulates the expression of a gene listed in Table 23. (Embodiment 158) A modified Zea sp. cell, wherein the modified plant cell includes at least two precise and separately targeted insertions in its genome, wherein the insertions are determined relative to a parent plant cell, and wherein at least one of the insertions regulates the expression of a gene or protein listed in Table 23, and wherein the genome of the modified plant cell is at least 95%, at least 96%, at least 97%, at least 98%, at least 99%, at least 99.5%, at least 99.9%, or at least 99.99% identical to the parent cell. (Embodiment 159) A modified Zea sp. cell, wherein the modified plant cell includes at least two precise and separately targeted modifications to its genome, wherein the modifications are determined relative to a parent plant cell, and wherein at least one of the modifications regulates the expression of a gene or protein listed in Table 23, and wherein the genome of the modified plant cell is at least 95%, at least 96%, at least 97%, at least 98%, at least 99%, at least 99.5%, at least 99.9%, or at least 99.99% identical to the parent cell. (Embodiment 160) The modified Zea sp. cell of any of embodiments 157-159, wherein at least one modification is the insertion or creation of a regulatory sequence listed in Table 24. (Embodiment 161) A method of manufacturing a processed Zea sp. product, including: (a) modifying a Zea sp. cell according to the method of any one of the preceding embodiments, (b) growing a modified Zea sp. plant from the cell, and (c) processing the modified Zea sp. plant into a processed product, thereby manufacturing a processed Zea sp. plant product. (Embodiment 162) The method of embodiment 161, wherein the processed product is meal, oil, juice, sugar, starch, fiber, an extract, wood or wood pulp, flour, or cloth. (Embodiment 163) The method of embodiment 161 or 162, further including packaging said product. (Embodiment 164) A method of manufacturing a Zea sp. plant product, including: (a) modifying a Zea sp plant cell according to the method of any one of embodiments 102-153, (b) growing a modified Zea sp plant from said plant cell, (c) harvesting a product of the modified plant, thereby manufacturing a plant product. (Embodiment 165) The method of embodiment 164, wherein the plant product is a product selected from the group consisting of leaves, vegetables, nuts, seeds, oil, flowers, fodder, silage, stover, and pollen. (Embodiment 166) The method of embodiment 164 or 165, further including packaging said plant product. (Embodiment 167) The method of any of embodiments 102-153 including the use of a donor polynucleotide, gRNA or crRNA described in the Examples herein. (Embodiment 168) A method of changing expression of a sequence of interest in a Zea sp. genome, including integrating a sequence encoded by a polynucleotide donor molecule at the site of at least one double-strand break (DSB) in a genome, wherein the polynucleotide donor molecule is selected from the group consisting of a double-stranded DNA, a single-stranded DNA, a single-stranded DNA/RNA hybrid, and a double-stranded DNA/RNA hybrid. (Embodiment 169) The method of embodiment 168, wherein the genome is that of a nucleus, mitochondrion, or plastid in a Zea sp. cell. (Embodiment 170) The method of embodiment 168, wherein the at least one DSB is introduced into the Zea sp. genome by at least one of the group consisting of: (a) a nuclease selected from the group consisting of an RNA-guided nuclease, an RNA-guided DNA endonuclease, a type II Cas nuclease, a Cas9, a type V Cas nuclease, a Cpf1 (Cas12a) nuclease, a CasY (Cas12d) nuclease, a CasX (Cas12e) nuclease, a C2c1 nuclease, a C2c3 nuclease, Cas12f nuclease, Cas12i nuclease, Cas12j nuclease, an engineered nuclease, a codon-optimized nuclease, a zinc-finger nuclease (ZFN), a transcription activator-like effector nuclease (TAL-effector nuclease), an Argonaute, and a meganuclease or engineered meganuclease; (b) a polynucleotide encoding one or more nucleases capable of effecting site-specific alteration of a target nucleotide sequence; and (c) a guide RNA (gRNA) for an RNA-guided nuclease, or a DNA encoding a gRNA for an RNA-guided nuclease. (Embodiment 171) The method of embodiment 168, wherein the at least one DSB is introduced into the Zea sp. genome by at least one treatment selected from the group consisting of: (a) bacterially mediated (e.g., Agrobacterium sp., Rhizobium sp., Sinorhizobium sp., Mesorhizobium sp., Bradyrhizobium sp., Azobacter sp., Phyllobacterium sp.) transfection; (b) Biolistics or particle bombardment; (c) treatment with at least one chemical, enzymatic, or physical agent; and (d) application of heat or cold, ultrasonication, centrifugation, positive or negative pressure, cell wall or membrane disruption or deformation, or electroporation. (Embodiment 172) The method of embodiment 168, wherein the at least one DSB in a genome is located: (a) within the sequence of interest, (b) upstream of the sequence of interest, or (c) downstream of the sequence of interest, and wherein the sequence of interest is a gene listed in Table 23. (Embodiment 173) The method of embodiment 168, wherein the sequence encoded by the polynucleotide donor molecule, when integrated into the genome, is functionally or operably linked to the sequence of interest. (Embodiment 174) The method of embodiment 168, wherein the sequence of interest includes coding sequence, non-coding sequence, or a combination of coding and non-coding sequence. (Embodiment 175) The method of embodiment 168, wherein the at least one DSB is two or more DSBs. (Embodiment 176) The method of embodiment 168, wherein the sequence encoded by the polynucleotide donor molecule that is integrated into each of the two or more DSBs is (a) identical, or (b) different, for each of the DSBs. (Embodiment 177) The method of embodiment 168, wherein the sequence encoded by the polynucleotide donor molecule includes at least one of the nucleotide sequences selected from the group consisting of: (a) DNA or RNA encoding at least one stop codon, or at least one stop codon on each strand, or at least one stop codon within each reading frame on each strand; (b) DNA or RNA encoding heterologous primer sequence; (c) DNA or RNA encoding a unique identifier sequence; (d) DNA or RNA encoding a transcript-stabilizing sequence; (e) DNA or RNA encoding a transcript-destabilizing sequence; (f) a DNA or RNA aptamer, or DNA encoding an RNA aptamer, or DNA or RNA encoding an amino acid aptamer; and (g) DNA or RNA encoding a sequence recognizable by a specific binding agent (h) a regulatory sequence listed in Table 24. (Embodiment 178) The method of embodiment 168, wherein the sequence encoded by the polynucleotide donor molecule includes DNA or RNA encoding a sequence recognizable by a specific binding agent, and wherein contacting the integrated sequence encoded by the polynucleotide donor molecule with the specific binding agent results in a change of expression of the sequence of interest. (Embodiment 179) A Zea sp. plant cell including in its genome a heterologous DNA sequence that includes: (a) a nucleotide sequence of a polynucleotide donor molecule integrated by the method of embodiment 168 at the site of a DSB in a genome; and (b) genomic nucleotide sequence adjacent to the site of the DSB; and (c) wherein the integrated sequence is selected from the regulatory sequences listed in Table 24. (Embodiment 180) A Zea sp. cell of embodiment 179, wherein the gene or protein whose expression is regulated by the integrated regulatory sequence is listed in Table 23. (Embodiment 181) A Zea sp. plant including the modified cell of embodiments 179 or 180. (Embodiment 182) The modified cell of embodiment 1, wherein the targeted modification is a deletion of an miRNA recognition site with the sequence of SEQ ID NO:999 in a 5′ UTR region of an SPX domain containing gene, wherein the targeted modification results in increased nitrogen use efficiency. (Embodiment 183) The modified cell of embodiment 1, wherein the targeted modification is a deletion or demethylation of a miniature inverted-repeat transposable element (MITE) sequence in a promoter region of NAC111 gene, wherein the targeted modification results in increased water use efficiency and enhanced drought tolerance. (Embodiment 184) The modified cell of embodiment 1, wherein the targeted modification is a nucleotide sequence substitution of a coding region of PYL-E gene, resulting an E149L mutation in PYL-E protein, wherein the targeted modification results in a PYL-E allele with hypersensitivity to ABA receptor and increased water use efficiency. (Embodiment 185) The modified cell of embodiment 1, wherein the targeted modification is an insertion of a promoter sequence of GA2-oxidase in a promoter region of PLA1 gene, wherein the targeted modification results in increased biomass and seed yield. (Embodiment 186) The modified cell of embodiment 36, wherein the modified cell includes at least three targeted modifications, wherein the targeted modifications are an insertion of a nitrogen responsive element in NRT2.2; an insertion of a nitrogen responsive element in GLN1.4; and an insertion of an OCS homologue in Dof1, wherein the targeted modifications result in increased nitrogen use efficiency. (Embodiment 187) The modified cell of embodiment 36, wherein the modified cell includes four targeted modifications, wherein the targeted modifications are an insertion of a nitrogen responsive element in NRT2.2; an insertion of a nitrogen responsive element in GLN1.4 gene; an insertion of an OCS homologue in Dof1; and a deletion of an miRNA recognition site in a 5′ UTR region of an SPX domain containing gene, wherein the targeted modifications result in increased nitrogen use efficiency. (Embodiment 188) The modified cell of embodiment 69, wherein the modified cell includes two targeted modifications, wherein the targeted modifications are a deletion or demethylation of a miniature inverted-repeat transposable element (MITE) sequence in a promoter region of NAC111 and an insertion of a promoter sequence of GA2-oxidase in a promoter region of PLA1, wherein the targeted modifications result in increased water use efficiency and enhanced drought tolerance together with increased biomass and seed yield. (Embodiment 189) The modified cell of embodiment 69, wherein the modified cell includes four targeted modifications, wherein the first modification is an insertion of a nitrogen responsive element NRT2.2, an insertion of a nitrogen responsive element in GLN1.4, an insertion of an OCS homologue in Dof1, or a deletion of an miRNA recognition site in a 5′ UTR region of an SPX domain containing gene GRMZM2G086430; and wherein the second modification is an insertion of a promoter sequence of GA2-oxidase in a promoter region of PLA1; the third modification is a nucleotide sequence substitution of a coding region of PYL-E gene, resulting an E149L mutation in PYL-E protein; and the fourth modification is a deletion or demethylation of a miniature inverted-repeat transposable element (MITE) sequence in a promoter region of NAC111, wherein the targeted modifications result in increased nitrogen use efficiency, increased biomass and seed yield, hypersensitivity to ABA receptor, and increased water use efficiency. (Embodiment 190) A modified Zea sp. plant derived from the modified cell of any of embodiments 182-189.

### ADDITIONAL EMBODIMENTS

[0230] 1. A modified Zea sp. cell comprising at least one targeted modification of a first gene and at least one targeted modification of a second gene, wherein the targeted modifications result in a change of expression in the first gene and a change of expression in the second gene, and wherein the changes of expression in the first and second genes are both associated with improvement, relative to a reference cell lacking the modifications, in an agronomically relevant trait selected from the group consisting of: abiotic stress, architecture, biotic stress, photosynthesis, and resource partitioning.
[0231] 2. The modified Zea sp. cell of embodiment 1, wherein the first and second genes are both selected from the group of genes consisting of the genes identified in Table 23 to be associated with an improved abiotic stress tolerance trait; or from the group of genes consisting of the genes identified in Table 23 to be associated with an improved architecture trait; or from the group of genes consisting of the genes identified in Table 23 to be associated with an improved biotic stress tolerance trait; or from the group of genes consisting of the genes identified in Table 23 to be associated with an improved photosynthesis trait; or from the group of genes consisting of the genes identified in Table 23 to be associated with an improved resource partitioning trait.
[0232] 3. The modified Zea sp. cell of embodiment 1 or 2, wherein the first and second genes are selected from: a gene associated with an improved abiotic stress tolerance trait and that comprises a DNA sequence that is at least 60% identical to the sequence of SEQ ID NO:433, 435, 437, 439, 441, 443, 445, 447, 449, 451, 453, 455, 457, 459, 461, 463, 465, 467, 469, 471, 473, 475, 477, 479, 481, 483, 485, 487, 489, 491, 493, 597, 1007, 1031, 1033, 1035, 1037, 1039, or 1041 or that encodes a protein comprising an amino acid sequence that is at least 95% identical to the amino acid sequence of SEQ ID NO: 434, 436, 438, 440, 442, 444, 446, 448, 450, 452, 454, 456, 458, 460, 462, 464, 466, 468, 470, 472, 474, 476, 478, 480, 482, 484, 486, 488, 490, 492, 494, 598, 1008, 1032, 1034, 1036, 1038, 1040, or 1042; or a gene associated with an improved architecture trait and that comprises a DNA sequence that is at least 60% identical to the sequence of SEQ ID NO: 497, 499, 501, 503, 505, 507, 509, 511, 513, 515, 517, 519, 521, 523, 525, 527, 529, 531, 533, 535, 537, 539, 541, 543, 545, 547, 549, 551, 553, 555, 557, 559, 561, 563, 565, 567, 569, 571, 573, 575, 577, 579, 581, 583, 585, 587, 589, 591, 593, 595, 597, or 599 or that encodes a protein comprising an amino acid sequence that is at least 95% identical to the amino acid sequence of SEQ ID NO: 498, 500, 502, 503, 506, 508, 510, 512, 514, 516, 518, 520, 522, 524, 526, 528, 530, 532, 534, 536, 538, 540, 542, 544, 546, 548, 550, 552, 554, 556, 558, 560, 562, 566, 568, 572, 574, 576, 578, 580, 582, 584, 586, 588, 590, 592, 594, 596, 598, or 600; or a gene associated with an improved biotic stress tolerance trait and that comprises a DNA sequence that is at least 60% identical to the sequence of SEQ ID NO: 601, 603, 605, 607, 609, 611, 613, 615, 617, 619, 621, 623, 625, 627, 629, 631, 633, 635, 637, 639, 643, 645, 647, 649, 651, or 653 or that encodes a protein comprising an amino acid sequence that is at least 95% identical to the amino acid sequence of SEQ ID NO: 602, 604, 606, 608, 610, 612, 614, 616, 618, 620, 622, 624, 626, 628, 630, 632, 634, 636, 638, 640, 642, 644, 646, 648, 650, 652, or 654; or a gene associated with an improved photosynthesis trait and that comprises a DNA sequence that is at least 60% identical to the sequence of SEQ ID NO: 655, 657, 659, 661, 663, or 665 or that encodes a protein comprising an amino acid sequence that is at least 90% identical to the amino acid sequence SEQ ID NO: 656, 658, 660, 662, 664, and 666; or a gene associated with an improved resource partitioning trait and that comprises a DNA sequence that is at least 60% identical to the sequence of SEQ ID NO: 451, 667, 669, 671, 673, 675, 677, 679, 681, 683, 685, 687, 689, 691, 693, 695, 697, 699, 701, 703, 705, 707, 709, 711, 713, 715, 717, 719, 721, 723, 725, 727, 729, 731, 733, 735, 737, 739, 741, 743, 745, 747, 749, 751, 753, 755, 757, 759, 1024, 1026, 1028, 1043, 1045, or 1053, or that encodes a protein comprising an amino acid sequence that is at least 90% identical to the amino acid sequence of SEQ ID NO: 452, 668, 670, 672, 674, 676, 678, 680, 682, 684, 686, 688, 690, 692, 694, 696, 698, 700, 702, 704, 706, 708, 710, 712, 714, 716, 718, 720, 722, 724, 726, 728, 730, 732, 734, 736, 738, 740, 742, 744, 746, 748, 750, 752, 754, 756, 758, 760, 762, 1025, 1027, 1029, 1044, 1046, or 1054.
[0233] 4. The modified Zea sp. cell of embodiment 1, wherein the first and second genes are both genes identified in Table 23 to be associated with resource partitioning, and wherein the changes of expression in the first and second genes are both associated with improvement, relative to a reference cell lacking the modifications, in resource partitioning, wherein the resource partitioning is nitrogen utilization or nitrogen transport.
[0234] 5. The modified Zea sp. cell of embodiment 4, wherein the first and second genes are selected from the group consisting of NRT2.2, Gln1.4, Dof1, an SPX domain-containing gene, Gln1.3, Asn synthetase, OsENOD93-1, AspAT, NAD(H)-dependent GOGAT 1, ZmDA1, and ZmDAR1.
[0235] 6. The modified Zea sp. cell of embodiment 4, wherein the first and second genes are selected from the group consisting of genes in the nitrate transporter (NRT), transcription factor Dof1, glutamine synthetase (GS), glutamate synthase (GOGAT), and alanine aminotransferase (AlaAT) enzyme families, and wherein the targeted modification results in increased expression of the first and second genes, relative to expression in a reference cell lacking the modifications.
[0236] 7. The modified Zea sp. cell of embodiment 6, wherein the first gene is a glutamine synthetase (GS) gene and the second gene is an alanine aminotransferase (AlaAT) gene, and wherein the targeted modification results in increased expression of the first and second genes, relative to expression in a reference cell lacking the modifications.
[0237] 8. The modified Zea sp. cell of any one of embodiments 4 to 6, wherein the targeted modifications of the first and second genes comprise: (i) an insertion of at least one nitrogen-responsive element sequence upstream of the transcription start site of the first and second genes; or (ii) an insertion of a transcription enhancing polynucleotide comprising the sequence of SEQ ID NO: 1030 upstream of the transcription start site of the first and second genes.
[0238] 9. The modified Zea sp. cell of any one of embodiments 1 to 8, wherein the targeted modification is of coding sequence or of non-coding sequence.
[0239] 10. The modified Zea sp. cell of any one of embodiments 1 to 9, wherein the change of expression is increased expression, decreased expression, or expression of a modified coding or non-coding sequence, relative to a reference cell lacking the modifications.
[0240] 11. The modified Zea sp. cell of any one of embodiments 1 to 10, wherein each targeted modification comprises: (a) deletion of genomic sequence at a double-strand break or between two double-strand breaks effected in coding or non-coding sequence; or (b) insertion of a predetermined sequence encoded by a polynucleotide donor molecule at a double-strand break or between two double-strand breaks effected in coding or non-coding sequence.
[0241] 12. The modified Zea sp. cell of any one of embodiments 2 to 7, wherein the targeted modification of a first gene from Table 23 and the targeted modification of a second gene from Table 23 both comprise insertion of a predetermined sequence encoded by one or more polynucleotide donor molecules, optionally wherein the predetermined sequence comprises a regulatory sequence from Table 24.
[0242] 13. The modified Zea sp. cell of embodiment 12, wherein the targeted modification comprises an insertion of a transcription enhancing polynucleotide comprising the sequence of SEQ ID NO: 1030 upstream of the transcription start site of the first and second genes.
[0243] 14. The modified Zea sp. cell of any one of embodiments 1 to 13, wherein the change of expression is increased expression and the targeted modifications comprise insertions of a translational enhancer sequence located about 10, 20, 30, or 40 base pairs (bp) to about 100, 240, 300, 400, 500, 1000, 2000, 3000, or 5000 bp of the transcriptional start site of the first gene or second gene.
[0244] 15. The modified Zea sp. cell of any one of embodiments 1 to 14, wherein the targeted modification is determined relative to a parent Zea sp. cell, and wherein the modified Zea sp. cell is devoid of mitotically or meiotically generated genetic or epigenetic changes relative to the parent Zea sp. cell.
[0245] 16. A modified Zea sp. plant grown from the modified Zea sp. cell of any one of embodiments 1 to 15, or a progeny plant or progeny seed of the modified plant, wherein cells of the modified plant, progeny plant, or progeny seed comprise the targeted modifications.
[0246] 17. The modified plant, progeny plant, or progeny seed of embodiment 16, wherein the first and second genes comprise genes selected from: the genes identified in Table 23 to be associated with abiotic stress; the genes identified in Table 23 to be associated with architecture; the genes identified in Table 23 to be associated with biotic stress; the genes identified in Table 23 to be associated with photosynthesis; or the genes identified in Table 23 to be associated with resource partitioning.
[0247] 18. The modified plant, progeny plant, or progeny seed of embodiment 16 or 17, wherein each of the first and second genes comprises:
[0248] a gene associated with an improved abiotic stress tolerance trait and that comprises a DNA sequence that is at least 60% identical to the sequence of SEQ ID NO:433, 435, 437, 439, 441, 443, 445, 447, 449, 451, 453, 455, 457, 459, 461, 463, 465, 467, 469, 471, 473, 475, 477, 479, 481, 483, 485, 487, 489, 491, 493, 597, 1007, 1031, 1033, 1035, 1037, 1039, or 1041 or that encodes a protein comprising an amino acid sequence that is at least 95% identical to the amino acid sequence of SEQ ID NO: 434, 436, 438, 440, 442, 444, 446, 448, 450, 452, 454, 456, 458, 460, 462, 464, 466, 468, 470, 472, 474, 476, 478, 480, 482, 484, 486, 488, 490, 492, 494, 598, 1008, 1032, 1034, 1036, 1038, 1040, or 1042; or
[0249] a gene associated with an improved architecture trait and that comprises a DNA sequence that is at least 60% identical to the sequence of SEQ ID NO: 497, 499, 501, 503, 505, 507, 509, 511, 513, 515, 517, 519, 521, 523, 525, 527, 529, 531, 533, 535, 537, 539, 541, 543, 545, 547, 549, 551, 553, 555, 557, 559, 561, 563, 565, 567, 569, 571, 573, 575, 577, 579, 581, 583, 585, 587, 589, 591, 593, 595, 597, or 599 or that encodes a protein comprising an amino acid sequence that is at least 95% identical to the amino acid sequence of SEQ ID NO: 498, 500, 502, 503, 506, 508, 510, 512, 514, 516, 518, 520, 522, 524, 526, 528, 530, 532, 534, 536, 538, 540, 542, 544, 546, 548, 550, 552, 554, 556, 558, 560, 562, 566, 568, 572, 574, 576, 578, 580, 582, 584, 586, 588, 590, 592, 594, 596, 598, or 600; or
[0250] a gene associated with an improved biotic stress tolerance trait and that comprises a DNA sequence that is at least 60% identical to the sequence of SEQ ID NO: 601, 603, 605, 607, 609, 611, 613, 615, 617, 619, 621, 623, 625, 627, 629, 631, 633, 635, 637, 639, 643, 645, 647, 649, 651, or 653 or that encodes a protein comprising an amino acid sequence that is at least 95% identical to the amino acid sequence of SEQ ID NO: 602, 604, 606, 608, 610, 612, 614, 616, 618, 620, 622, 624, 626, 628, 630, 632, 634, 636, 638, 640, 642, 644, 646, 648, 650, 652, or 654; or
[0251] a gene associated with an improved photosynthesis trait and that comprises a DNA sequence that is at least 60% identical to the sequence of SEQ ID NO: 655, 657, 659, 661, 663, or 665 or that encodes a protein comprising an amino acid sequence that is at least 90% identical to the amino acid sequence SEQ ID NO: 656, 658, 660, 662, 664, and 666; or
[0252] a gene associated with an improved resource partitioning trait and that comprises a DNA sequence that is at least 60% identical to the sequence of SEQ ID NO: 451, 667, 669, 671, 673, 675, 677, 679, 681, 683, 685, 687, 689, 691, 693, 695, 697, 699, 701, 703, 705, 707, 709, 711, 713, 715, 717, 719, 721, 723, 725, 727, 729, 731, 733, 735, 737, 739, 741, 743, 745, 747, 749, 751, 753, 755, 757, 759, 1024, 1026, 1028, 1043, 1045, or 1053, or that encodes a protein comprising an amino acid sequence that is at least 90% identical to the amino acid sequence of SEQ ID NO: 452, 668, 670, 672, 674, 676, 678, 680, 682, 684, 686, 688, 690, 692, 694, 696, 698, 700, 702, 704, 706, 708, 710, 712, 714, 716, 718, 720, 722, 724, 726, 728, 730, 732, 734, 736, 738, 740, 742, 744, 746, 748, 750, 752, 754, 756, 758, 760, 762, 1025, 1027, 1029, 1044, 1046, or 1054.
[0253] 19. The modified plant, progeny plant, or progeny seed of embodiment 16, wherein the first and second genes are both genes identified in Table 23 to be associated with resource partitioning, and wherein the changes of expression in the first and second genes are both associated with improvement, relative to a reference cell lacking the modifications, in resource partitioning, wherein the resource partitioning is nitrogen utilization or nitrogen transport.
[0254] 20. The modified plant, progeny plant, or progeny seed of embodiment 19, wherein the first and second genes are selected from the group consisting of NRT2.2, Gln1.4, Dof1, an SPX domain-containing gene, Gln1.3, Asn synthetase, OsENOD93-1, AspAT, NAD(H)-dependent GOGAT 1, ZmDA1, and ZmDAR1.
[0255] 21. The modified plant, progeny plant, or progeny seed of embodiment 19, wherein the first and second genes are selected from the group consisting of genes in the nitrate transporter (NRT), transcription factor Dof1, glutamine synthetase (GS), glutamate synthase (GOGAT), and alanine aminotransferase (AlaAT) enzyme families, and wherein the targeted modification results in increased expression of the first and second genes.
[0256] 22. The modified plant, progeny plant, or progeny seed of embodiment 20 or 21, wherein the targeted modifications of the first and second genes comprise: (i) insertion of at least one nitrogen-responsive element sequence upstream of the transcription start site of the first and second genes; or (ii) an insertion of a transcription enhancing polynucleotide comprising the sequence of SEQ ID NO: 1030 upstream of the transcription start site of the first and second genes.
[0257] 23. A modified Zea sp. plant comprising a targeted modification in a first gene and a targeted modification in a second gene, wherein the first gene comprises a first DNA sequence that is at least 60%, 70%, 80%, 90%, 95%, 96%, 97%, 98% or 99% identical to SEQ ID NO: 597, 1007, 1031, 1033, 1035, 1037, 1039, or 1041, wherein the second gene comprises a second DNA sequence that is distinct from the first DNA sequence and at least 60%, 70%, 80%, 90%, 95%, 96%, 97%, 98% or 99% identical to SEQ ID NO: 433, 435, 437, 439, 441, 443, 445, 447, 449, 451, 453, 455, 457, 459, 461, 463, 465, 467, 469, 471, 473, 475, 477, 479, 481, 483, 485, 487, 489, 491, 493, 597, 1007, 1031, 1033, 1035, 1037, 1039, or 1041, wherein the targeted modifications result in an increase in expression of the first and second gene relative to a reference plant lacking the modifications, and wherein the increase of expression in the first and second gene are associated with an improvement in one or more abiotic stress tolerance traits relative to the first reference plant lacking the modifications.
[0258] 24. The Zea sp. plant of embodiment 29, wherein:
[0259] (a) the first gene encodes a protein comprising an amino acid sequence that is at least 95%, 96%, 97%, 98% or 99% identical to the amino acid sequence of SEQ ID NO: 598, 1008, 1032, 1034, 1036, 1038, 1040, or 1042; and/or
[0260] (b) the second gene encodes a protein comprising an amino acid sequence that is at least 95%, 96%, 97%, 98% or 99% identical to the amino acid sequence of SEQ ID NO: 434, 436, 438, 440, 442, 444, 446, 448, 450, 452, 454, 456, 458, 460, 462, 464, 466, 468, 470, 472, 474, 476, 478, 480, 482, 484, 486, 488, 490, 492, 494, 598, 1008, 1032, 1034, 1036, 1038, 1040, or 1042.
[0261] 25. The Zea sp. plant of embodiment 29, wherein the improvement in an abiotic stress tolerance trait is an improvement in water use efficiency, and wherein the second gene comprises a DNA sequence that is at least 60%, 70%, 80%, 90%, 95%, 96%, 97%, 98% or 99% identical to SEQ ID NOs: 439, 441, 443, 445, 447, 449, 451, 453, 455, 457, 459, 461, 463, 465, 467, 469, 471, 473, 475, 477, 597, 1007, 1031, 1033, 1035, 1037, 1039, or 1041.
[0262] 26. The Zea sp. plant of embodiment 29, wherein the improvement in an abiotic stress tolerance trait is an improvement in water use efficiency and wherein:
[0263] (a) the first gene encodes a protein comprising an amino acid sequence that is at least 95%, 96%, 97%, 98% or 99% identical to the amino acid sequence of SEQ ID NO: 598, 1008, 1032, 1034, 1036, 1038, 1040, or 1042; and/or
[0264] (b) the second gene encodes a protein comprising an amino acid sequence that is at least 95%, 96%, 97%, 98% or 99% identical to the amino acid sequence of SEQ ID NO: 440, 442, 444, 446, 448, 450, 452, 454, 456, 458, 460, 462, 464, 466, 468, 470, 472, 474, 476, 478, 598, 1008, 1032, 1034, 1036, 1038, 1040, or 1042.
[0265] 27. A modified Zea sp. plant comprising a targeted modification in a first gene and a targeted modification in a second gene, wherein the first gene comprises a first DNA sequence that is at least 60%, 70%, 80%, 90%, 95%, 96%, 97%, 98% or 99% identical to SEQ ID NO: 451, 1043, or 1045, wherein the second gene comprises a second DNA sequence that is distinct from the first DNA sequence and that is at least 60%, 70%, 80%, 90%, 95%, 96%, 97%, 98% or 99% identical to SEQ ID NO: 451, 683, 685, 687, 689, 691, 693, 695, 1024, 1026, 1028, 1043, or 1045, wherein the targeted modifications result in an increase in expression of the first and second gene relative to a reference Zea sp. plant lacking the modifications, and wherein the increase of expression in the first and second gene are associated with an improvement in nitrogen use efficiency relative to the first reference plant lacking the modification.
[0266] 28. The modified Zea sp. plant of embodiment 33, wherein
[0267] (a) the first gene encodes a protein comprising an amino acid sequence that is at least 95%, 96%, 97%, 98%, or 99% identical to the amino acid sequence of SEQ ID NO: 452, 1044, or 1046; and/or
[0268] (b) the second gene encodes a protein comprising an amino acid sequence that is at least 95%, 96%, 97%, 98%, or 99% identical to the amino acid sequence of SEQ ID NO: 452, 684, 686, 688, 690, 692, 694, 696, 1025, 1027, 1029, 1044, or 1046.
[0269] 29. A modified Zea sp. plant part obtained from the plant of any one of embodiments 23 to 28, wherein the plant part comprises the modifications.
[0270] 30. The modified plant part of embodiment 29, wherein the plant part is a seed.
[0271] 31. A method of Zea sp. plant seed production, said method comprising crossing the modified Zea sp. plant of any one of embodiments 16 to 34 with a second Zea sp. plant to produce Zea sp. plant seed.
[0272] 32. The method of embodiment 31, further comprising the step of harvesting the seed.
[0273] 33. The method of embodiment 31 or 32, wherein the Zea sp. plant or the second Zea sp. plant further comprise a transgene conferring a desired trait and the harvested seed comprise the transgene.
[0274] 34. A method of Zea sp. plant seed production, said method comprising selfing the plant of any one of embodiments 16 to 32 to produce Zea sp. plant seed and optionally harvesting the seed.
[0275] 35. The method of embodiment 34, wherein the Zea sp. plant and the seed are inbred.
[0276] 36. A method of producing a Zea sp. plant comprising an added desired trait, said method comprising introducing a transgene conferring the desired trait into the plant of any one of embodiments 16 to 28.
[0277] 37. A processed product or commodity product obtained from the modified plant, progeny plant, plant part, or seed of any one of embodiments 16 to 28.
[0278] 38. A method of producing a treated Zea sp. seed comprising contacting the seed of embodiment 16 to 28 or 30 with a composition comprising a biological agent, insecticide, and/or fungicide.
[0279] 39. A method of producing Zea sp. plant material comprising growing the Zea sp. plant of any one of embodiments 16 to 28.
[0280] 40. The method of embodiment 39, wherein growing comprises at least one of sowing a seed which germinates and forms the plant, irrigating the seed or plant, and/or treating the plant or the seed with a biological agent, herbicide, insecticide, or fungicide.
[0281] 41. The method of embodiment 39 or 40, wherein the method further comprises harvesting the seed from the plant.
[0282] 42. A method of effecting in a Zea sp. genome at least one targeted modification of a first gene and at least one targeted modification of a second gene, wherein the targeted modifications result in a change of expression in the first gene and a change of expression in the second gene, wherein:
[0283] (i) the first and second genes are both selected:
[0284] from the group of genes consisting of the genes identified in Table 23 to be associated with an improved abiotic stress tolerance trait; or
[0285] from the group of genes consisting of the genes identified in Table 23 to be associated with an improved architecture trait; or
[0286] from the group of genes consisting of the genes identified in Table 23 to be associated with an improved biotic stress tolerance trait; or
[0287] from the group of genes consisting of the genes identified in Table 23 to be associated with an improved photosynthesis trait; or
[0288] from the group of genes consisting of the genes identified in Table 23 to be associated with an improved resource partitioning trait; and
[0289] (ii) each targeted modification is achieved by integrating a predetermined sequence encoded by a polynucleotide donor molecule at a double-strand break (DSB) located upstream of, downstream of, or within the first or the second gene, and wherein the polynucleotide donor molecule is selected from the group consisting of a double-stranded DNA, a single-stranded DNA, a single-stranded DNA/RNA hybrid, and a double-stranded DNA/RNA hybrid.
[0290] 43. The method of embodiment 42, wherein the first and second genes are selected from:
[0291] (a) a gene associated with an improved abiotic stress tolerance trait and that comprises a DNA sequence that is at least 60% identical to the sequence of SEQ ID NO:433, 435, 437, 439, 441, 443, 445, 447, 449, 451, 453, 455, 457, 459, 461, 463, 465, 467, 469, 471, 473, 475, 477, 479, 481, 483, 485, 487, 489, 491, 493, 597, 1007, 1031, 1033, 1035, 1037, 1039, or 1041 or that encodes a protein comprising an amino acid sequence that is at least 95% identical to the amino acid sequence of SEQ ID NO: 434, 436, 438, 440, 442, 444, 446, 448, 450, 452, 454, 456, 458, 460, 462, 464, 466, 468, 470, 472, 474, 476, 478, 480, 482, 484, 486, 488, 490, 492, 494, 598, 1008, 1032, 1034, 1036, 1038, 1040, or 1042; or
[0292] (b) a gene associated with an improved architecture trait and that comprises a DNA sequence that is at least 60% identical to the sequence of SEQ ID NO: 497, 499, 501, 503, 505, 507, 509, 511, 513, 515, 517, 519, 521, 523, 525, 527, 529, 531, 533, 535, 537, 539, 541, 543, 545, 547, 549, 551, 553, 555, 557, 559, 561, 563, 565, 567, 569, 571, 573, 575, 577, 579, 581, 583, 585, 587, 589, 591, 593, 595, 597, or 599 or that encodes a protein comprising an amino acid sequence that is at least 95% identical to the amino acid sequence of SEQ ID NO: 498, 500, 502, 503, 506, 508, 510, 512, 514, 516, 518, 520, 522, 524, 526, 528, 530, 532, 534, 536, 538, 540, 542, 544, 546, 548, 550, 552, 554, 556, 558, 560, 562, 566, 568, 572, 574, 576, 578, 580, 582, 584, 586, 588, 590, 592, 594, 596, 598, or 600; or
[0293] (c) a gene associated with an improved biotic stress tolerance trait and that comprises a DNA sequence that is at least 60% identical to the sequence of SEQ ID NO: 601, 603, 605, 607, 609, 611, 613, 615, 617, 619, 621, 623, 625, 627, 629, 631, 633, 635, 637, 639, 643, 645, 647, 649, 651, or 653 or that encodes a protein comprising an amino acid sequence that is at least 95% identical to the amino acid sequence of SEQ ID NO: 602, 604, 606, 608, 610, 612, 614, 616, 618, 620, 622, 624, 626, 628, 630, 632, 634, 636, 638, 640, 642, 644, 646, 648, 650, 652, or 654; or
[0294] (d) a gene associated with an improved photosynthesis trait and that comprises a DNA sequence that is at least 60% identical to the sequence of SEQ ID NO: 655, 657, 659, 661, 663, or 665 or that encodes a protein comprising an amino acid sequence that is at least 90% identical to the amino acid sequence SEQ ID NO: 656, 658, 660, 662, 664, and 666; or
[0295] (e) a gene associated with an improved resource partitioning trait and that comprises a DNA sequence that is at least 60% identical to the sequence of SEQ ID NO: 451, 667, 669, 671, 673, 675, 677, 679, 681, 683, 685, 687, 689, 691, 693, 695, 697, 699, 701, 703, 705, 707, 709, 711, 713, 715, 717, 719, 721, 723, 725, 727, 729, 731, 733, 735, 737, 739, 741, 743, 745, 747, 749, 751, 753, 755, 757, 759, 1024, 1026, 1028, 1043, or 1045, or 1053, or that encodes a protein comprising an amino acid sequence that is at least 90% identical to the amino acid sequence of SEQ ID NO: 452, 668, 670, 672, 674, 676, 678, 680, 682, 684, 686, 688, 690, 692, 694, 696, 698, 700, 702, 704, 706, 708, 710, 712, 714, 716, 718, 720, 722, 724, 726, 728, 730, 732, 734, 736, 738, 740, 742, 744, 746, 748, 750, 752, 754, 756, 758, 760, 762, 1025, 1027, 1029, 1044, 1046, or 1054.
[0296] 44. The method of embodiment 42, wherein the first and the second gene are associated with an improvement in water use efficiency, wherein the first gene comprises a DNA sequence that is at least 60%, 70%, 80%, 90%, 95%, 96%, 97%, 98%, or 99% identical to 1031, 1033, 1035, 1037, 1039, or 1041 and the second gene comprises a DNA sequence that is at least 60% identical to SEQ ID NO: 439, 441, 443, 445, 447, 449, 451, 453, 455, 457, 459, 461, 463, 465, 467, 469, 471, 473, 475, 477, 597, or 1007.
[0297] 45. The method of embodiment 42, wherein the first and the second gene are associated with an improvement in nitrogen use efficiency, wherein the first gene comprises a DNA sequence that is at least 60%, 70%, 80%, 90%, 95%, 96%, 97%, 98%, or 99% identical to SEQ ID NO: 1043 or 1045 and the second gene comprises a DNA sequence that is at least 60%, 70%, 80%, 90%, 95%, 96%, 97%, 98%, or 99% identical to SEQ ID NO: 451, 683, 685, 687, 689, 691, 693, 695, 1024, 1026, or 1028.
[0298] 46. The method of embodiment 42, wherein the first gene comprises a first DNA sequence that is at least 60%, 70%, 80%, 90%, 95%, 96%, 97%, 98% or 99% identical to SEQ ID NO: 597, 1007, 1031, 1033, 1035, 1037, 1039, or 1041, wherein the second gene comprises a second DNA sequence that is distinct from the first DNA sequence and at least 60%, 70%, 80%, 90%, 95%, 96%, 97%, 98% or 99% identical to SEQ ID NO: 433, 435, 437, 439, 441, 443, 445, 447, 449, 451, 453, 455, 457, 459, 461, 463, 465, 467, 469, 471, 473, 475, 477, 479, 481, 483, 485, 487, 489, 491, 493, 597, 1007, 1031, 1033, 1035, 1037, 1039, or 1041, wherein the targeted modifications result in an increase in expression of the first and second gene relative to a reference plant lacking the modifications, and wherein the increase of expression in the first and second gene are associated with an improvement in one or more abiotic stress tolerance traits relative to the first reference plant lacking the modifications.
[0299] 47. The method of embodiment 48, wherein the first gene comprises a first DNA sequence that is at least 60%, 70%, 80%, 90%, 95%, 96%, 97%, 98% or 99% identical to SEQ ID NO: 451, 1043, or 1045, wherein the second gene comprises a second DNA sequence that is distinct from the first DNA sequence and that is at least 60%, 70%, 80%, 90%, 95%, 96%, 97%, 98% or 99% identical to SEQ ID NO: 451, 683, 685, 687, 689, 691, 693, 695, 1024, 1026, 1028, 1043, or 1045, wherein the targeted modifications result in an increase in expression of the first and second gene relative to a reference Zea sp. plant lacking the modifications, and wherein the increase of expression in the first and second gene are associated with an improvement in nitrogen use efficiency relative to the first reference plant lacking the modification.
[0300] 48. The method of any one of embodiments 48 to 53, wherein the DSB is introduced into the Zea sp. genome by at least one of the group consisting of:
[0301] (a) a nuclease selected from the group consisting of an RNA-guided nuclease, an RNA-guided DNA endonuclease, a type II Cas nuclease, a Cas9, a type V Cas nuclease, Cpf1 (Cas12a) nuclease, a CasY (Cas12d) nuclease, a CasX (Cas12e) nuclease, a C2c1 nuclease, a C2c3 nuclease, Cas12f nuclease, Cas12i nuclease, Cas12j nuclease, engineered nuclease, a codon-optimized nuclease, a zinc-finger nuclease (ZFN), a transcription activator-like effector nuclease (TAL-effector nuclease), an Argonaute, and a meganuclease or engineered meganuclease;
[0302] (b) a polynucleotide encoding one or more nucleases capable of effecting site-specific alteration of a target nucleotide sequence; and
[0303] (c) a guide RNA (gRNA) for an RNA-guided nuclease, or a DNA encoding a gRNA for an RNA-guided nuclease.
[0304] 49. The method of any one of embodiments 42 to 48, wherein the DSB is introduced into the Zea sp. genome by at least one treatment selected from the group consisting of:
[0305] (a) bacterially mediated (e. g., Agrobacterium sp., Rhizobium sp., Sinorhizobium sp., Mesorhizobium sp., Bradyrhizobium sp., Azobacter sp., Phyllobacterium sp.) transfection;
[0306] (b) Biolistics or particle bombardment;
[0307] (c) treatment with at least one chemical, enzymatic, or physical agent; and
[0308] (d) application of heat or cold, ultrasonication, centrifugation, positive or negative pressure, cell wall or membrane disruption or deformation, or electroporation.
[0309] 50. The method of any one of embodiments 42 to 49, wherein the change of expression in the first gene and the change of expression in the second gene are both associated with improvement, relative to a reference Zea sp. genome lacking the targeted modifications, in an agronomically relevant trait selected from the group consisting of: abiotic stress, architecture, biotic stress, photosynthesis, and resource partitioning.
[0310] 51. The method of any one of embodiments 42 to 50, wherein the sequence encoded by the polynucleotide donor molecule that is integrated into the double-strand break (DSB) located upstream of, downstream of, or within the first gene, is (a) identical to or (b) different from the sequence encoded by the polynucleotide donor molecule that is integrated into the double-strand break (DSB) located upstream of, downstream of, or within the second gene
[0311] 52. The Zea sp. plants, plant parts, or methods of any one of embodiments 1 to 51, wherein the targeted modifications are modifications which are non-naturally occurring in Zea sp. plants or plant parts.

### EXAMPLES

### Example 1

[0312] This example illustrates techniques for preparing a plant cell or plant protoplast useful in compositions and methods of the disclosure, for example, in providing a reaction mixture including a plant cell having a double-strand break (DSB) at least one locus in its genome. More specifically this non-limiting example describes techniques for preparing isolated, viable plant protoplasts from monocot plants.

[0313] The following mesophyll protoplast preparation protocol (modified from one publicly available at molbio[dot]mgh[dot]harvard.edu/sheenweb/protocols_reg[dot]html) is generally suitable for use with monocot plants such as maize (Zea mays):

[0314] Prepare an enzyme solution containing 0.6 molar mannitol, 10 millimolar MES pH 5.7, 1.5% cellulase R10, and 0.3% macerozyme R10. Heat the enzyme solution at 50-55 degrees Celsius for 10 minutes to inactivate proteases and accelerate enzyme solution and cool it to room temperature before adding 1 millimolar CaCl₂, 5 millimolar β-mercaptoethanol, and 0.1% bovine serum albumin. Pass the enzyme solution through a 0.45 micrometer filter. Prepare a washing solution containing 0.6 molar mannitol, 4 millimolar MES pH 5.7, and 20 millimolar KCl.

[0315] Obtain second leaves of the monocot plant (e. g., maize) and cut out the middle 6-8 centimeters. Stack ten leaf sections and cut into 0.5 millimeter-wide strips without bruising the leaves. Submerge the leaf strips completely in the enzyme solution in a petri dish, cover with aluminum foil, and apply vacuum for 30 minutes to infiltrate the leaf tissue. Transfer the dish to a platform shaker and incubate for an additional 2.5 hours' digestion with gentle shaking (40 rpm). After digestion, carefully transfer the enzyme solution (now containing protoplasts) using a serological pipette through a 35 micrometer nylon mesh into a round-bottom tube; rinse the petri with 5 milliliters of washing solution and filter this through the mesh as well. Centrifuge the protoplast suspension at 1200 rpm, 2 minutes in a swing-bucket centrifuge. Aspirate off as much of the supernatant as possible without touching the pellet; gently wash the pellet once with 20 milliliters washing buffer and remove the supernatant carefully. Gently resuspend the pellet by swirling in a small volume of washing solution, then resuspend in 10-20 milliliters of washing buffer. Place the tube upright on ice for 30 minutes-4 hours (no longer). After resting on ice, remove the supernatant by aspiration and resuspend the pellet with 2-5 milliliters of washing buffer. Measure the concentration of protoplasts using a hemocytometer and adjust the concentration to 2×10\hat{ }5 protoplasts/milliliter with washing buffer.

### Example 2

[0316] This example illustrates a method of delivery of an effector molecule to a plant cell or plant protoplast to effect a genetic change, in this case introduction of a double-strand break in the genome. More specifically, this non-limiting example describes a method of delivering a guide RNA (gRNA) in the form of a ribonucleoprotein (RNP) to isolated plant protoplasts.

[0317] The following delivery protocol (modified from one publicly available at molbio[dot]mgh[dot]harvard.edu/sheenweb/protocols_reg[dot]html) is generally suitable for use with monocot plants such as maize (Zea mays):

[0318] Prepare a polyethylene glycol (PEG) solution containing 40% PEG 4000, 0.2 molar mannitol, and 0.1 molar CaCl₂. Prepare an incubation solution containing 170 milligram/liter KH₂PO₄, 440 milligram/liter CaCl₂·2H₂O, 505 milligram/liter KNO₃, 160 milligram/liter NH₄NO₃, 370 milligram/liter MgSO₄·7H₂O, 0.01 milligram/liter KI, 1 milligram/liter H₃BO₃, 0.1 milligram/liter MnSO₄·4H₂O, 1 milligram/liter ZnSO₄·7H₂O, 0.03 milligram/liter CuSO₄·5H₂O, 1 milligram/liter nicotinic acid, 1 milligram/liter thiamine HCl, 1 milligram/liter pyridoxine HCl, 0.2 milligram/liter folic acid, 0.01 milligram/liter biotin, 1 milligram/liter D-Ca-pantothenate, 100 milligram/liter myo-inositol, 40 grams/liter glucose, 60 grams/liter mannitol, 700 milligram/liter MES, 10 microliter/liter Tween 80, 1 milligram/liter 2,4-D, and 1 milligram/liter 6-benzylaminopurine (BAP); adjust pH to 5.6.

[0319] Prepare a crRNA:tracrRNA or guide RNA (gRNA) complex by mixing equal amounts of CRISPR crRNA and tracrRNA (obtainable e. g., as custom-synthesized Alt-R™ CRISPR crRNA and tracrRNA oligonucleotides from Integrated DNA Technologies, Coralville, IA): mix 6 microliters of 100 micromolar crRNA and 6 microliters of 100 micromolar tracrRNA, heat at 95 degrees Celsius for 5 minutes, and then cool the crRNA:tracrRNA complex to room temperature. To the cooled gRNA solution, add 10 micrograms Cas9 nuclease (Aldevron, Fargo, ND) and incubate 5 minutes at room temperature to allow the ribonucleoprotein (RNP) complex to form. Add the RNP solution to 100 microliters of monocot protoplasts (prepared as described in Example 1) in a microfuge tube; add 5 micrograms salmon sperm DNA (VWR Cat. No.: 95037-160) and an equal volume of the PEG solution. Mix gently by tapping. After 5 minutes, dilute with 880 microliters of washing buffer and mix gently by inverting the tube. Centrifuge 1 minute at 1200 rpm and then remove the supernatant. Resuspend the protoplasts in 1 milliliter incubation solution and transfer to a multi-well plate. The efficiency of genome editing is assessed by any suitable method such as heteroduplex cleavage assay or by sequencing, as described elsewhere in this disclosure.

[0320] The above protocols for delivery of gRNAs as RNPs to plant protoplasts are adapted for delivery of guide RNAs alone to monocot protoplasts that express Cas9 nuclease by transient or stable transformation; in this case, the guide RNA complex is prepared as before and added to the protoplasts, but no Cas9 nuclease and no salmon sperm DNA is added. The remainder of the procedures are identical.

### Example 3

[0321] This example illustrates genome editing in monocot plants and further illustrates a method of identifying a nucleotide sequence associated with a phenotype of interest. More specifically, this non-limiting example describes delivering a guide RNA (gRNA) in the form of a ribonucleoprotein (RNP) to isolated plant protoplasts, followed by screening to identify the protoplasts in which the target nucleotide sequence has been altered by introduction of a double-stranded break (DSB).

[0322] The target gene selected for editing was the maize (Zea mays) alcohol dehydrogenase ADH1 (see www[dot]maizegdb[dot]org/gene_center/gene/GRMZM2G442658) with the partial genomic sequence:

(SEQ ID NO: 21)
GAACAGTGCCGCAGTGGCGCTGATCTTGTATGCTATCCTGCAATCGTGG
TGAACTTATTTCTTTTATATCCTTTACTCCCATGAAAAGGCTAGTAATC
TTTCTCGATGTAACATCGTCCAGCACTGCTATTACCGTGTGGTCCATCC
GACAGTCTGGCTGAACACATCATACGATCTATGGAGCAAAAATCTATCT
TCCCTGTTCTTTAATGAAGGACGTCATTTTCATTAGTATGATCTAGGAA
TGTTGCAACTTGCAAGGAGGCGTTTCTTTCTTTGAATTTAACTAACTCG
TTGAGTGGCCCTGTTTCTCGGACGTAAGGCCTTTGCTGCTCCACACATG
TCCATTCGAATTTTACCGTGTTTAGCAAGGGCGAAAAGTTTGCATCTTG
ATGATTTAGCTTGACTATGCGATTGCTTTCCTGGACCCGTGCAGCTGCG
GTGGCATGGGAGGCCGGCAAGCCACTGTCGATCGAGGAGGTGGAGGTAG
CGCCTCCGCAGGCCATGGAGGTGCGCGTCAAGATCCTCTTCACCTCGCT
CTGCCACACCGACGTCTACTTCTGGGAGGCCAAGGTATCTAATCAGCCA
TCCCATTTGTGATCTTTGTCAGTAGATATGATACAACAACTCGCGGTTG
ACTTGCGCCTTCTTGGCGGCTTATCTGTCTTAGGGGCAGACTCCCGTGT
TCCCTCGGATCTTTGGCCACGAGGCTGGAGGGTA;

the first exon (SEQ ID NO:22), located at nucleotide positions 409-571 of SEQ ID NO:21 is indicated by bold, underlined text and guide RNA (crRNA) sequences were designed to edit this exon.

[0323] Maize protoplasts were prepared as described in Example 1. A ribonucleoprotein (RNP) was prepared with Cas9 nuclease (Aldevron, Fargo, ND) and a guide RNA complex of a crRNA (ZmADH1-B) having the sequence GGCCUCCCAGAAGUAGACGUGUUUUAGAGCUAUGCU (SEQ ID NO:23) and a tracrRNA (both purchased from Integrated DNA Technologies, Coralville, IA). This was used for editing the target gene ADH1 in the maize protoplasts following the procedures described in Example 1. A T7 endonuclease (T7E1, New England Biolabs, Ipswich, MA) was used in a heteroduplex cleavage assay to detect on-target editing. In brief, genomic DNA from the protoplasts was amplified by PCR; the amplified products were denatured and re-annealed to allow heteroduplex formation between wild-type or unedited DNA and the edited DNA. T7E1, which recognizes and cleaves mismatched DNA, was used to digest the heteroduplexes, and the resulting cleaved and full-length PCR products are analyzed by gel electrophoresis. The primers used for the T7E1 assay had the sequences GAACAGTGCCGCAGTGGCG (forward primer, SEQ ID NO:24) and TACCCTCCAGCCTCGTGGC (reverse primer, SEQ ID NO:25) for an expected amplicon size of 720 base-pairs (i. e., SEQ ID NO:21). Gel electrophoretic analysis demonstrated the presence of the expected cleaved products.

[0324] For quantitation of editing efficiency, next-generation sequencing (NGS) analysis was used. A second set of primers were used for CRISPR sequencing; these had the sequences ACTATGCGATTGCTTTCCTGGAC (forward primer, SEQ ID NO:26) and ACCGCGAGTTGTTGTATCATATCT (reverse primer, SEQ ID NO:27) for an expected amplicon size of 230 base-pairs which includes the ADH1 first exon (i. e.,

SEQ ID NO: 28)
ACTATGCGATTGCTTTCCTGGACCCGTGCAGCTGCGGTGGCATGGGAGG
CCGGCAAGCCACTGTCGATCGAGGAGGTGGAGGTAGCGCCTCCGCAGGC
CATGGAGGTGCGCGTCAAGATCCTCTTCACCTCGCTCTGCCACACCGAC
GTCTACTTCTGGGAGGCCAAGGTATCTAATCAGCCATCCCATTTGTGAT
CTTTGTCAGTAGATATGATACAACAACTCGCGGT,;

the ADH1 first exon (SEQ ID NO:22) is indicated by bold, underlined text. The NGS sequencing results are provided in FIGS. 1A-1C. The editing efficiency was estimated to be 38%.

[0325] Another gene selected for editing was the maize (Zea mays) Babyboom gene BBM2 (see www[dot]maizegdb[dot]org/gene_center/gene/GRMZM2G141638) with the partial genomic sequence:

(SEQ ID NO: 29)
AACCGGTGTAATACATACTAAGGGCTAGTTTGGGAACCCTGGTTTTCTA
AGGAATTTTATTTTTCCAAAAAAAATAGTTTATTTTTCCTTCGGAAATT
AGGAATCTCTTATAAAATTCGAGTTCCCAAACTATTCCTAATATATATA
TCATACTCTCCATCAGTCTATATATAGATTACATATAGTAAGTATAGAG
TATCTCGCTATCACATAGTGCCACTAATCTTCTGGAGTGTACCAGTTGT
ATAAATATCTATCAGTATCAGCACTACTGTTTGCTGAATACCCCAAAAC
TCTCTGCTTGACTTCTCTTCCCTAACCTTTGCACTGTCCAAAATGGCTT
CCTGATCCCCTCACTTCCTCGAATCATTCTAAGAAGAAACTCAAGCCGC
TACCATTAGGGGCAGATTAATTGCTGCACTTTCAGATAATCTACCATGG
CCACTGTGAACAACTGGCTCGCTTTCTCCCTCTCCCCGCAGGAGCTGCC
GCCCTCCCAGACGACGGACTCCACGCTCATCTCGGCCGCCACCGCCGAC
CATGTCTCCGGCGATGTCTGCTTCAACATCCCCCAAGGTAGCATCTATC
TATCTGGCGACATACGTG;

promoter sequence (SEQ ID NO:30), located at nucleotide positions 1-254 of SEQ ID NO:29 is indicated by bold, underlined text and guide RNA (crRNA) sequences were designed to edit this non-coding DNA.

[0326] Maize protoplasts were prepared as described in Example 1. A ribonucleoprotein (RNP) was prepared with Cas9 nuclease (Aldevron, Fargo, ND) and a guide RNA complex of a crRNA (ZmBBM2-2) having the sequence AAGAGAUUCCUAAUUUCCGAGUUUUAGAGCUAUGCU (SEQ ID NO:31) and a tracrRNA (both purchased from Integrated DNA Technologies, Coralville, IA). This was used for editing the target gene BBM2 in the maize protoplasts following the procedures described in Example 1.

[0327] For quantitation of editing efficiency, next-generation sequencing (NGS) analysis was used. The primers used for CRISPR sequencing had the sequences GGGAACCCTGGTTTTCTAAG (forward primer, SEQ ID NO:32) and GCAAACAGTAGTGCTGATACTG (reverse primer, SEQ ID NO:33) for an expected amplicon size of 248 base-pairs which includes the BBM2 promoter sequence (i. e.,

SEQ ID NO: 34)
GGGAACCCTGGTTTTCTAAGGAATTTTATTTTTCCAAAAAAAATAGTTT
ATTTTTCCTTCGGAAATTAGGAATCTCTTATAAAATTCGAGTTCCCAAA
CTATTCCTAATATATATATCATACTCTCCATCAGTCTATATATAGATTA
CATATAGTAAGTATAGAGTATCTCGCTATCACATAGTGCCACTAATCTT
CTGGAGTGTACCAGTTGTATAAATATCTATCAGTATCAGCACTACTGTT
TGC,;

the BBM2 promoter sequence (SEQ ID NO:30) is indicated by bold, underlined text.

[0328] Similar genomic modification is carried out in maize whole plants or in maize plant tissues using procedures as described in Examples 31-34.

[0329] Arrayed screens can be conveniently carried out with protoplasts in multi-well (e. g., 24- or 96-well) plates. In embodiments where editing of a target nucleotide sequence is expected to provide an observable phenotype, the phenotype can be used to select the plant cells or protoplasts having the edited sequence. Optionally, the plant cells or plant protoplasts are grown or cultured under conditions that permit expression of the phenotype, allowing selection of the plant cells or plant protoplasts that exhibit the phenotype.

[0330] Pooled screens are carried out in a similar fashion, except that editing is carried out with multiple guide RNAs (e. g., in the form of multiple RNPs) provided to a complement of plant protoplasts. For example, maize (Zea mays, variety B73) protoplasts are treated with a mixture of RNPs for delivering different gRNAs targeting a selection of 2630 transcription factors in 5 families identified in maize (sequences publicly available at grassius[dot]org/tf_browsefamily.html?species=Maize). Those guides that are over-represented at the read-out stage are those that target genes that are identified as candidates for controlling cell division.

### Example 4

[0331] This example illustrates a method of integrating sequence encoded by a polynucleotide (such as a double-stranded DNA, a single-stranded DNA, a single-stranded DNA/RNA hybrid, or a double-stranded DNA/RNA hybrid) donor molecule at the site of at least one double-strand break (DSB) in a genome. More specifically, this non-limiting example illustrates using a ribonucleoprotein (RNP) including a guide RNA (gRNA) and a nuclease to effect a DSB in the genome of a monocot plant, and integration of sequence encoded by a double-stranded DNA (dsDNA) at the site of the DSB.

[0332] Experimental details were similar to those described in Example 3. As in Example 3, the target gene selected for editing was the maize (Zea mays) alcohol dehydrogenase ADH1 (see www[dot]maizegdb[dot]org/gene_center/gene/GRMZM2G442658) with the partial genomic sequence of SEQ ID NO:21; the first exon (SEQ ID NO:22) is located at nucleotide positions 409-571 of SEQ ID NO:21 and guide RNA (crRNA) sequences were designed to edit this exon.

[0333] Maize protoplasts were prepared as described in Examples 1 and 3. A ribonucleoprotein (RNP) was prepared with Cas9 nuclease (Aldevron, Fargo, ND) and a guide RNA complex of a crRNA (ZmADH1-B) having the sequence GGCCUCCCAGAAGUAGACGUGUUUUAGAGCUAUGCU (SEQ ID NO:23) and a tracrRNA (both purchased from Integrated DNA Technologies, Coralville, IA). A chemically modified double-stranded DNA (dsDNA) molecule of 34 base pairs was produced by annealing one strand having the sequence 5′-GTTTAATTGAGTTGTCATATGTTAATAACGGTAT-3′ (SEQ ID NO:267, which contains an NdeI recognition site at nucleotide positions 16-21 shown as underlined font) and a second strand having the sequence 5′-ATACCGTTATTAACATATGACAACTCAATTAAAC-3′ (SEQ ID NO:268) (both purchased from Integrated DNA Technologies, Coralville, IA); each strand was phosphorylated on the 5′ end and contained two phosphorothioate linkages at each terminus (i. e., the two linkages between the most distal three bases on either end of the strand). Transfection procedures for editing the target gene ADH1 in the maize protoplasts were identical to those described in Examples 1 and 3, except the dsDNA was added at a concentration of 1 nanomolar together with the RNP. (In an alternative procedure, the RNP can be added first, followed by the dsDNA.)

[0334] A T7 endonuclease (T7E1, New England Biolabs, Ipswich, MA) was used in a heteroduplex cleavage assay to detect on-target editing. In brief, genomic DNA from the protoplasts was amplified by PCR; the amplified products were denatured and re-annealed to allow heteroduplex formation between wild-type or unedited DNA and the edited DNA. T7E1, which recognizes and cleaves mismatched DNA, was used to digest the heteroduplexes, and the resulting cleaved and full-length PCR products are analyzed by gel electrophoresis. The primers used for the T7E1 assay had the sequences GAACAGTGCCGCAGTGGCG (forward primer, SEQ ID NO:24) and TACCCTCCAGCCTCGTGGC (reverse primer, SEQ ID NO:25) for an expected amplicon size of 720 base-pairs (i. e., SEQ ID NO:21). In a separate endonuclease assay, NdeI restriction enzyme was used. In both the T7E1 and NdeI assays, gel electrophoretic analysis demonstrated the presence of the expected cleavage products.

[0335] For quantitation of editing efficiency, next-generation sequencing (NGS) analysis was used. A second set of primers were used for CRISPR sequencing; these had the sequences ACTATGCGATTGCTTTCCTGGAC (forward primer, SEQ ID NO:26) and ACCGCGAGTTGTTGTATCATATCT (reverse primer, SEQ ID NO:27) for an expected amplicon size of 230 base-pairs (SEQ ID NO:28) which includes the ADH1 first exon (SEQ ID NO:22). The NGS sequencing results are provided in FIGS. 2A-2D, depicting the alignments of the cloned sequences SEQ ID NOs:269-304. The editing efficiency (percentage of the total population of cells in which DSB is correctly induced in the genome) was estimated to be 23% and the insertion efficiency (percentage of the total population of cells in which the dsDNA molecule is successfully introduced at the DSB correctly located in the genome) was estimated to be 17%.

[0336] Additional experiments were carried out using the same procedure for editing the ADH1 maize gene, using variations of the 34-base-pair chemically modified dsDNA molecule (all purchased from Integrated DNA Technologies, Coralville, IA) provided at 1 nanomolar together with the RNP to maize protoplasts. In one set of experiments, the dsDNA molecule was provided by annealing one DNA strand having the sequence of SEQ ID NO:267 and a second DNA strand having the sequence (SEQ ID NO:268); each strand was phosphorylated on the 5′ end but contained no phosphorothioate linkages. In a second set of experiments, the dsDNA molecule was provided by annealing one DNA strand having the sequence of SEQ ID NO:267 and a second DNA strand having the sequence (SEQ ID NO:268); each strand was phosphorylated on the 5′ end and contained four phosphorothioate linkages at each terminus (i. e., the four linkages between the most distal five bases on either end of the strand). In a second set of experiments, the dsDNA molecule was provided by annealing one DNA strand having the sequence of SEQ ID NO:267 and that was phosphorylated on the 5′ end and contained two phosphorothioate linkages at each terminus (i. e., the two linkages between the most distal three bases on either end of the strand), and a second DNA strand having the sequence (SEQ ID NO:268) and that contained two phosphorothioate linkages at each terminus (i. e., the two linkages between the most distal three bases on either end of the strand) but was not phosphorylated on the 5′ end.

[0337] Similar genomic modification is carried out in maize whole plants or in maize plant tissues using procedures as described in Examples 31-34.

### Example 5

[0338] This example illustrates a method of changing expression of a sequence of interest in a genome, comprising integrating sequence encoded by a polynucleotide (such as a double-stranded DNA, a single-stranded DNA, a single-stranded DNA/RNA hybrid, or a double-stranded DNA/RNA hybrid) donor molecule at the site of at least one double-strand break (DSB) in a genome. More specifically, this non-limiting example illustrates using a ribonucleoprotein (RNP) including a guide RNA (gRNA) and a nuclease to effect a DSB in the genome of a monocot plant, and integration of sequence encoded by a double-stranded DNA (dsDNA) at the site of the DSB, wherein the sequence encoded by the dsDNA molecule includes a sequence recognizable by a specific binding agent, and wherein contacting the integrated sequence encoded by the dsDNA molecule with the specific binding agent results in a change of expression of a sequence of interest. In this particular example, sequence encoded by the dsDNA molecule is integrated at a DSB located in non-coding genomic sequence (i. e., in a promoter region), the sequence recognizable by a specific binding agent includes an auxin response element (AuxRE) sequence, the specific binding agent is an auxin (e. g., an exogenously applied auxin), and the change of expression is upregulation of the sequence of interest.

[0339] Experimental details were similar to those described in Examples 3 and 4. The target gene selected for editing was non-coding sequence, in this case the partial promoter sequence (sequence upstream of the transcription start site) of the maize (Zea mays) Lc gene (see www[dot]maizegdb[dot]org/gene_center/gene/GRMZM5G822829) with the sequence of

(SEQ ID NO: 305)
GGGTTGTTGTGGGTTGAACCCGTCCCAACCATCATCAACTCGCTAGCCAA
ACACACGCTTAGGGGCCAAAGCAGTGCTATAATATGAGTGGTGGCGCTAT
TATATATAGCGTCAGAGAACTTAGATCTGATATTCTGATGAAGAAAAAAT
GACTTTACTGACTACGAAAGAAGAAGAAAGGAGCTATAGAGAGAGAGAAA
AAGAGGGGTCGTGTAGTGCTTAAACTGTACATGAACAGCAGTAGTGTTAC
AGAAGCTAAACTCAACCAGAGCTCCACCAAAGACAAAGAGGGTCTACTTC
CATCACCGTCTTGCTCGGTCACTTGGAGCTCTGTCCATAAATTAAACCCA
TCTTGGATCCCAAGGTTCGTGGCATATCTGTAGGCATCTACCCCGTCTTC
GTCGTCCGCTCCTCACTAGCTACCAAGAGGTCGCCATTATTGCCAACATA
GAGTGTACGTGGATGTCTATATATATGCCTACTTGCACCCATATGGC;

and guide RNA (crRNA) sequences were designed to edit this non-coding sequence.

[0340] Maize protoplasts were prepared as described in Examples 1, 3, and 4. A ribonucleoprotein (RNP) was prepared with Cas9 nuclease (Aldevron, Fargo, ND) and a guide RNA complex of a crRNA (ZmLc Pro-1) having the sequence GCUCCUCACUAGCUACCAAGGUUUUAGAGCUAUGCU (SEQ ID NO:306) and a tracrRNA (both purchased from Integrated DNA Technologies, Coralville, IA). Three different lengths of chemically modified double-stranded DNA (dsDNA) molecules were used in this experiment, with each dsDNA added at a concentration of 1 nanomolar together with the RNP. The transfection procedures for editing the target gene Lc in the maize protoplasts were otherwise identical to those described in Example 4.

[0341] All dsDNA molecules were purchased from Integrated DNA Technologies, Coralville, IA. One dsDNA (“3×DR5”) molecule of 34 base pairs was produced by annealing a first strand having the sequence 5′-ccgacaaaaggccgacaaaaggccgacaaaaggt-3′ (SEQ ID NO:306) and a second strand having the sequence 5′-accttttgtcggccttttgtcggccttttgtcgg-3′ (SEQ ID NO:307, which includes three concatenated copies of an auxin response element having the sequence ccttttgtcgg (SEQ ID NO:308)). A second dsDNA (“6×DR5”) molecule of 68 base pairs was produced by annealing a first strand having the sequence 5′-GCCGACAAAAGGCCGACAAAAGGCCGACAAAAGGCCGACAAAAGGCCGACAAAAGGCCG ACAAAAGGT-3′ (SEQ ID NO:309) and a second strand having the sequence 5′-ACCTTTTGTCGGCCTTTTGTCGGCCTTTTGTCGGCCTTTTGTCGGCCTTTTGTCGGCCTTTTGT CGGC-3′ (SEQ ID NO:310, which includes six concatenated copies of the auxin response element having the sequence SEQ ID NO:308). A third dsDNA (“9×DR5”) molecule of 100 base pairs was produced by annealing a first strand having the sequence 5′-CCGACAAAAGGCCGACAAAAGGCCGACAAAAGGCCGACAAAAGGCCGACAAAAGGCCGAC AAAAGGCCGACAAAAGGCCGACAAAAGGCCGACAAAAGGT-3′ (SEQ ID NO:311) and a second strand having the sequence 5′-ACCTTTTGTCGGCCTTTTGTCGGCCTTTTGTCGGCCTTTTGTCGGCCTTTTGTCGGCCTTTTGT CGGCCTTTTGTCGGCCTTTTGTCGGCCTTTTGTCGG-3′ (SEQ ID NO:312 which includes nine concatenated copies of the auxin response element having the sequence SEQ ID NO:308). In all cases, each strand was phosphorylated on the 5′ end and contained two phosphorothioate linkages at each terminus (i. e., the two linkages between the most distal three bases on either end of the strand).

[0342] For quantitation of editing efficiency, next-generation sequencing (NGS) analysis was used. A second set of primers were used for CRISPR sequencing; these had the sequences CTCCACCAAAGACAAAGAGGG (forward primer, SEQ ID NO:313) and GCCATATGGGTGCAAGTAGGC (reverse primer, SEQ ID NO:314) for an expected amplicon size of 226 base-pairs (SEQ ID NO:315). Based on the NGS sequencing results, the editing efficiency (percentage of the total population of cells in which DSB is correctly induced in the genome) for the 3×DR5 insertion was estimated to be 34% and the insertion efficiency (percentage of the total population of cells in which the dsDNA molecule is successfully introduced at the DSB correctly located in the genome) was estimated to be 21%; for the 6×DR5 insertion, the editing efficiency was estimated to be 25% and the insertion efficiency was estimated to be 3%; and for the 9×DR5 insertion, the editing efficiency was estimated to be 11% and the insertion efficiency was estimated to be less than 1%.

[0343] All of the dsDNA molecules were designed to contain at least one sequence recognizable by a specific binding agent, in this case multiple copies of an auxin response element (SEQ ID NO:308). As the dsDNA molecules were integrated at the site of a DSB in promoter sequence operably linked to the gene of interest (the endogenous maize Lc gene), and the culture medium contained an herbicide (2, 4-dichlorophenoxyacetic acid) with auxin-like properties, expression of the gene of interest (the Lc gene) was expected to increase in cells that had the dsDNA molecule integrated into their genome, relative to that in cells that did not have the dsDNA molecule integrated into their genome. Quantitative RT-PCR was employed on three technical replicates per treatment to measure the relative expression of the Lc gene. Controls were cells that had been subjected to the transfection procedure without an RNP. Results are provided in Table 1 with Lc gene expression levels normalized to tubulin. These data demonstrate that, in each case, integration of the dsDNA molecules containing the auxin response factor sequences into the Lc promoter region resulted in very strong upregulation of Lc expression in the presence of auxin.

TABLE 1

| | | | Increase |
|---|---|---|---|
| | Lc relative | standard | in relative |
| Treatment | expression | deviation | expression |
| dsDNA = 3xDR5 | 3863.48 | 174.46 | 304-fold |
| dsDNA = 6xDR5 | 1479.15 | 74.99 | 116-fold |
| dsDNA = 9xDR5 | 1030.89 | 28.01 | 81-fold |
| RNP alone (no dsDNA) | 12.72 | 2.63 | 1 |
| no RNP | 1.02 | 0.25 | n.a. |

### Example 6

[0344] This example illustrates a method of changing expression of a sequence of interest in a genome, comprising integrating sequence encoded by a polynucleotide (such as a double-stranded DNA, a single-stranded DNA, a single-stranded DNA/RNA hybrid, or a double-stranded DNA/RNA hybrid) donor molecule at the site of at least one double-strand break (DSB) in a genome. This example illustrates introducing at least two DSBs into a genome by one or more nucleases in such a way that genomic sequence is deleted between the DSBs (leaving a deletion with blunt ends, overhangs or a combination of a blunt end and an overhang), and sequence encoded by at least one polynucleotide molecule is integrated between the DSBs (i. e., sequence encoded by at least one individual polynucleotide molecule is integrated at the location of the deleted genomic sequence). In an embodiment, the polynucleotide molecule includes one or more strands containing chemically modified DNA. Embodiments include double-stranded DNA or double-stranded DNA/RNA hybrid molecules, and single-stranded DNA or single-stranded DNA/RNA hybrid molecules, the sequence of which in analogous procedures is integrated at the location of genomic sequence that has been deleted between two DSBs. More specifically, this non-limiting example illustrates using multiple different ribonucleoproteins (RNPs), wherein each RNP includes a guide RNA (gRNA) and a nuclease, to effect multiple DSBs in the genome of a monocot plant, and integration of sequence encoded by a double-stranded DNA (dsDNA) at the location of the genomic sequence that is deleted between two DSBs. In this particular example, the sequence encoded by the dsDNA molecule includes a sequence recognizable by a specific binding agent and is integrated between two DSBs that are introduced into non-coding genomic sequence (i. e., in a promoter region); the sequence recognizable by a specific binding agent includes an auxin response element (AuxRE) sequence, the specific binding agent is an auxin (e. g., an exogenously applied auxin), and contacting the integrated dsDNA molecule with the specific binding agent results in a change of expression of the sequence of interest (upregulation of the gene to which the promoter is operably linked). This example also illustrates a method to modify expression of a sequence of interest (e. g., increased or decreased levels of the sequence's transcript or of a polypeptide encoded by the sequence, a change in stability of the sequence's transcript, or a change in the expression pattern of the sequence) by modifying a region of the genome that is operably linked to the sequence of interest, i. e., modification of that operably linked genomic region results in a change the expression level or expression pattern of the sequence of interest.

[0345] Experimental details were similar to those described in Examples 3, 4, and 5. The target gene selected for editing was non-coding sequence, in this case the partial promoter sequence (sequence upstream of the transcription start site) of the maize (Zea mays) Lc gene (see www[dot]maizegdb[dot]org/gene_center/gene/GRMZM5G822829) with the sequence of GGGTTGTTGTGGGTTGAACCCGTCCCAACCATCATCAACTCGCTAGCCAAACACACGCTTAG GGGCCAAAGCAGTGCTATAATATGAGTGGTGGCGCTATTATATATAGCGTCAGAGAACTTA GATCTGATATTCTGATGAAGAAAAAATGACTTTACTGACTACGAAAGAAGAAGAAAGGAGC TATAGAGAGAGAGAAAAAGAGGGGTCGTGTAGTGCTTAAACTGTACATGAACAGCAGTAGT GTTACAGAAGCTAAACTCAACCAGAGCTCCACCAAAGACAAAGAGGGTCTACTTCCATCAC CGTCTTGCTCGGTCACTTGGAGCTCTGTCCATAAATTAAACCCATCTTGGATCCCAAGGTTC GTGGCATATCTGTAGGCATCTACCCCGTCTTCGTCGTCCGCTCCTCACTAGCTACCAAGAGG TCGCCATTATTGCCAACATAGAGTGTACGTGGATGTCTATATATATGCCTACTTGCACCCAT ATGGC (SEQ ID NO:305); and guide RNA (crRNA) sequences were designed to edit this non-coding sequence.

[0346] Maize protoplasts were prepared as described in Examples 1, 3, 4, and 5. Ribonucleoproteins (RNPs) were prepared with Cas9 nuclease (Aldevron, Fargo, ND) and guide RNA complexes. Two guide RNA complexes were made with a crRNA and a tracrRNA (crRNAs and tracrRNA were purchased from Integrated DNA Technologies, Coralville, IA); the first guide RNA complex used a crRNA (ZmLc Pro-1) having the sequence GCUCCUCACUAGCUACCAAGGUUUUAGAGCUAUGCU (SEQ ID NO:306) and the second guide RNA complex used a crRNA (ZmLc Pro-3) having the sequence CUCCAAGUGACCGAGCAAGAGUUUUAGAGCUAUGCU (SEQ ID NO:334).

[0347] Three different lengths of chemically modified double-stranded DNA (dsDNA) molecules were used in this experiment, with each dsDNA added at a concentration of 1 nanomolar together with the RNP. The transfection procedures for editing the target gene Lc in the maize protoplasts were otherwise identical to those described in Example 4 and 5. All dsDNA molecules were purchased from Integrated DNA Technologies, Coralville, IA. One dsDNA (“3×DR5”) molecule of 34 base pairs was produced by annealing a first strand having the sequence 5′-ccgacaaaaggccgacaaaaggccgacaaaaggt-3′ (SEQ ID NO:306) and a second strand having the sequence 5′-accttttgtcggccttttgtcggccttttgtcgg-3′ (SEQ ID NO:307, which includes three concatenated copies of an auxin response element having the sequence ccttttgtcgg (SEQ ID NO:308)). A second dsDNA (“6×DR5”) molecule of 68 base pairs was produced by annealing a first strand having the sequence 5′-GCCGACAAAAGGCCGACAAAAGGCCGACAAAAGGCCGACAAAAGGCCGACAAAAGGCCG ACAAAAGGT-3′ (SEQ ID NO:309) and a second strand having the sequence 5′-ACCTTTTGTCGGCCTTTTGTCGGCCTTTTGTCGGCCTTTTGTCGGCCTTTTGTCGGCCTTTTGT CGGC-3′ (SEQ ID NO:310, which includes six concatenated copies of the auxin response element having the sequence SEQ ID NO:308). A third dsDNA (“9×DR5”) molecule of 100 base pairs was produced by annealing a first strand having the sequence 5′-CCGACAAAAGGCCGACAAAAGGCCGACAAAAGGCCGACAAAAGGCCGACAAAAGGCCGAC AAAAGGCCGACAAAAGGCCGACAAAAGGCCGACAAAAGGT-3′ (SEQ ID NO:311) and a second strand having the sequence 5′-ACCTTTTGTCGGCCTTTTGTCGGCCTTTTGTCGGCCTTTTGTCGGCCTTTTGTCGGCCTTTTGT CGGCCTTTTGTCGGCCTTTTGTCGGCCTTTTGTCGG-3′ (SEQ ID NO:312 which includes nine concatenated copies of the auxin response element having the sequence SEQ ID NO:308). In all cases, each strand was phosphorylated on the 5′ end and contained two phosphorothioate linkages at each terminus (i. e., the two linkages between the most distal three bases on either end of the strand).

[0348] For quantitation of editing efficiency, next-generation sequencing (NGS) analysis was used. A second set of primers were used for CRISPR sequencing; these had the sequences CTCCACCAAAGACAAAGAGGG (forward primer, SEQ ID NO:313) and GCCATATGGGTGCAAGTAGGC (reverse primer, SEQ ID NO:314) for an expected amplicon size of 226 base-pairs (SEQ ID NO:315).

[0349] All of the dsDNA molecules were designed to contain at least one sequence recognizable by a specific binding agent, in this case multiple copies of an auxin response element (SEQ ID NO:308). In this example, the dsDNA molecules were integrated at the site where non-coding genomic sequence was deleted (i. e., integrated between the DSBs introduced at two discrete locations in the genome, in this case in the Lc promoter). This effected replacement of part of the Lc promoter sequence with multiple copies of the auxin response element. As the culture medium contained an herbicide (2, 4-dichlorophenoxyacetic acid) with auxin-like properties, expression of the gene of interest (the endogenous maize Lc gene) operably linked to the Lc promoter sequence was expected to increase in cells that had any of the dsDNA molecules integrated into their genome, relative to that in cells that did not have a dsDNA molecule integrated into their genome.

[0350] Quantitative RT-PCR was employed on three technical replicates per treatment to measure the relative expression of the Lc gene. Results are provided in Table 2 with relative Lc gene expression levels normalized to tubulin. These data demonstrate that, in each case, integration of sequence encoded by the dsDNA molecules containing the auxin response factor sequences into the Lc promoter region resulted in very strong upregulation of Lc expression in the presence of an exogenously provided auxin. The strongest upregulation of Lc expression was observed in the treatment using both the ZmLc Pro-1 and ZmLc Pro-3 RNPs (e. g., >40-fold increase observed with the 3×DR5 dsDNA and >35-fold increase observed with the 6×DR5, relative to controls transfected without any RNP), which may indicate that introduction of two DSBs into the genome and integration of sequence encoded by the dsDNA molecule between the two DSBs provided greater efficacy than introducing either of the two DSBs individually into the genome and integrating sequence encoded by the dsDNA molecule at the site of the individual DSB.

TABLE 2

| | No oligo | | 3x | | 6x | | 9x | |
|---|---|---|---|---|---|---|---|---|
| crRNA | Average | STD | Average | STD | Average | STD | Average | STD |
| ZmLc Pro-1 | 1.0 | 0.04 | 25.5 | 0.86 | 17.8 | 0.30 | 1.1 | 0.04 |
| ZmLc Pro-3 | 1.0 | 0.05 | 32.7 | 0.91 | 27.7 | 2.43 | 1.5 | 0.48 |
| ZmLc Pro-1 + | 1.0 | 0.04 | 41.4 | 0.73 | 36.7 | 1.65 | 4.3 | 0.27 |
| ZmLc Pro-3 | | | | | | | | |

[0351] Similar genomic modification is carried out in maize whole plants or in maize plant tissues using procedures as described in Examples 31-34. In a non-limiting example, similar genomic modification is carried out with AsCas12a or “AsCpf1” (from Acidaminococcus sp.) and LbCas12a or “LbCpf1” (from Lachnospiraceae bacteria) nuclease; see, e.g., Zetsche et al. (2015) Cell, 163:759-771; U.S. Pat. No. 9,790,490. A ribonucleoprotein (RNP) is prepared with AsCas12a (Aldevron, Fargo, ND) and a guide RNA complex including a crRNA (ZmLc Pro-Cpf1) having the sequence UAAUUUCUACUCUUGUAGAUUGGACAGAGCUCCAAGUGACC (SEQ ID NO:1020). The transfection procedures with different lengths (3×DR5, 6×DR5, and 9×DR5) of chemically modified double-stranded DNA (dsDNA) molecules together with the AsCpf1 or LbCpf1 RNPs are essentially the same as those described above for the Cas9 RNP transfections.

[0352] One of skill in the art would recognize that there are alternative methods for introducing DSBs into the genome (e. g., use of CRISPR nucleases other than Cas9, such as CasX, CasY, and Cpf1, zinc-finger nucleases (ZFNs), transcription activator-like effector nucleases (TAL-effector nucleases or TALENs), Argonaute proteins, or a meganuclease or engineered meganuclease) and thus similar embodiments of the approach described herein include use of any of these methods for introducing two or more DSBs into a genome in such a way that genomic sequence is deleted between the DSBs, and integration of at least one polynucleotide (such as a double-stranded DNA, a single-stranded DNA, a single-stranded DNA/RNA hybrid, or a double-stranded DNA/RNA hybrid) molecule at the location of the genomic sequence that is deleted between the DSBs.

### Example 7

[0353] This example illustrates a method of modifying a sequence of interest in a genome, comprising integrating sequence encoded by a polynucleotide (such as a double-stranded DNA, a single-stranded DNA, a single-stranded DNA/RNA hybrid, or a double-stranded DNA/RNA hybrid) donor molecule at the site of at least one double-strand break (DSB) in a genome. This example illustrates introducing at least two DSBs into a genome by one or more nucleases in such a way that genomic sequence is deleted between the DSBs (leaving a deletion with blunt ends, overhangs or a combination of a blunt end and an overhang), and sequence encoded by at least one polynucleotide molecule is integrated between the DSBs (i. e., sequence encoded by at least one individual polynucleotide molecule is integrated at the location of the deleted genomic sequence), thus replacing the deleted genomic sequence. More specifically, this non-limiting example illustrates using multiple different ribonucleoproteins (RNPs), wherein each RNP includes a guide RNA (gRNA) and a nuclease, to effect multiple DSBs in the genome of a monocot plant, and integration of sequence encoded by a double-stranded DNA (dsDNA) at the location of the genomic sequence that is deleted between two DSBs. In embodiments, this technique is useful, e. g., for replacing regions of genomic sequence such as one or more exons (“exon exchange”) or one or more protein domains. In an example, DSBs are introduced into intronic sequence on each side of an exon, resulting in deletion of the exon, and—when sequence encoded by at least one dsDNA molecule is integrated at the location of the deleted exon—incorporation of a “replacement” exon. This technique avoids editing inaccuracies such as unintentional nucleotide changes, deletions, or additions at the nuclease cleavage sites in the resulting exon sequence or the messenger RNA encoded by the exon. In the particular example described below, this technique is used to replace a “wild-type” exon (an exon having unmodified, native sequence) of the maize EPSPS genomic sequence with a modified exon sequence that encodes an EPSPS protein having resistance to glyphosate.

[0354] Experimental details were similar to those described in Examples 3, 4, and 5. The target gene selected for editing was the maize (Zea mays, B73 line) enolpyruvylshikimate phosphate synthase1 (EPSPS) gene (see www[dot]maizegdb[dot]org/gene_center/gene/Zm00001d045450) with the partial genomic sequence of acaacaaaaaaaggtaacctcgctactaacataacaaaatacttgttgcttattaattatatgttttttaatctttgatcAGGGGACAACAGTGG TTGATAACCTGTTGAACAGTGAGGATGTCCACTACATGCTCGGGGCCTTGAGGACTCTTGGT CTCTCTGTCGAAGCGGACAAAGCTGCCAAAAGAGCTGTAGTTGTTGGCTGTGGTGGAAAGT TCCCAGTTGAGGATTCTAAAGAGGAAGTGCAGCTCTTCTTGGGGAATGCTGGAACTGCAAT GCGGCCATTGACAGCAGCTGTTACTGCTGCTGGTGGAAATGCAACgtatgtttcctctctttctctctacaatact tgctggagttagtatgaaacccatgggtatgtctagt (SEQ ID NO:335); a first intronic sequence (nucleotides 1-80 of SEQ ID NO:335) and a second intronic sequence (nucleotides 325-392 of SEQ ID NO:335) are given in lower-case font, exonic sequence (nucleotides 81-324 of SEQ ID NO:335) is given in upper-case font, a first crRNA (guide RNA) target site sequence (nucleotides 21-40 of SEQ ID NO:335) and a second crRNA (guide RNA) target site sequence (nucleotides 360-379 of SEQ ID NO:335) are italicized and the PAM sites (nucleotides 18-20 and nucleotides 380-382 of SEQ ID NO:335) are underlined.

[0355] Maize protoplasts were prepared as described in Examples 1, 3, 4, 5, and 6. Ribonucleoproteins (RNPs) were prepared with Cas9 nuclease (Aldevron, Fargo, ND) and guide RNA complexes. Two guide RNA complexes were made with a crRNA and a tracrRNA (crRNAs and tracrRNA were purchased from Integrated DNA Technologies, Coralville, IA); the first guide RNA complex used a crRNA (EPS-gRNA-1) having the sequence AUUUUGUUAUGUUAGUAGCGGUUUUAGAGCUAUGCU (SEQ ID NO:336) and the second guide RNA complex used a crRNA (EPS-gRNA-2) having the sequence GGAGUUAGUAUGAAACCCAUGUUUUAGAGCUAUGCU (SEQ ID NO:337).

[0356] A dsDNA molecule was prepared by PCR using primers and a template purchased from Integrated DNA Technologies, Coralville, IA. The primers were had the sequences 5′-P-T*A*CTAACATAACAAAATACTTGT (forward primer, SEQ ID NO:338) and 5′-P-G*G*TTTCATACTAACTCCAGCAAG (reverse primer, SEQ ID NO:339), where P represents a 5′ phosphorylation and * indicates a phosphorothioate linkage. The template sequence is given by 5′-TACTAACATAACAAAATACTTGTTGCTTATTAATTATATGTTTTTTAATCTTTGATCAGGGGA CAACAGTGGTTGATAACCTGTTGAACAGTGAGGATGTCCACTACATGCTCGGGGCCTTGAG GACTCTTGGTCTCTCTGTCGAAGCGGACAAAGCTGCCAAAAGAGCTGTAGTTGTTGGCTGTG GTGGAAAGTTCCCAGTTGAGGATTCTAAAGAGGAAGTGCAGCTCTTCTTGGGGAATGCTGG AATTGCAATGCGGGCATTGACAGCAGCTGTTACTGCTGCTGGTGGAAATGCAACGTATGTTT CCTCTCTTTCTCTCTACAATACTTGCTGGAGTTAGTATGAAACC-3′ (SEQ ID NO:340), with nucleotide changes (relative to the wild-type sequence) at positions 250 and 261 (indicated by underlined font) of SEQ ID NO:340 to provide the amino acid mutations T1021 and P106A in the mature protein, which are point mutations found in glyphosate-resistant EPSPS.

[0357] Similar genomic modification is carried out in maize whole plants or in maize plant tissues using procedures as described in Examples 31-34.

[0358] NGS sequencing data indicated that the replacement exon sequence encoded by the dsDNA molecule was correctly integrated at the location of the deleted exon. The EPSPS genomic sequence of 0.48% of the total reads included the nucleotide changes (relative to the wild-type sequence) at positions 250-261 of SEQ ID NO:340, to provide the amino acid mutations T1021 and P106A in the mature protein; this was accompanied by deletion of part of the intronic sequence 3′ to the modified exon.

[0359] In a related embodiment, the sequence encoding a small RNA recognition site for a small RNA (e. g., an siRNA or a miRNA) expressed only in a specific tissue (for example, miRNAs specifically expressed in male reproductive tissue or female reproductive tissue, e. g., the miRNAs disclosed in Table 6 of U.S. Pat. No. 8,334,430, incorporated herein by reference and including the sequences provided herein in Table A and B, or the siRNAs disclosed in U.S. Pat. No. 9,139,838, incorporated herein by reference and including the sequences provided herein in Table C), encoded by a polynucleotide (such as a double-stranded DNA, a single-stranded DNA, a single-stranded DNA/RNA hybrid, or a double-stranded DNA/RNA hybrid) donor molecule, is further integrated elsewhere in the EPSPS genomic sequence, e. g., in the 3′ untranslated region. This limits expression of the glyphosate-resistant EPSPS protein to tissues other than those in which the small RNA is endogenously expressed, and leaves the male reproductive tissue or female reproductive tissue susceptible to glyphosate; this approach is useful for providing male-sterile or female-sterile plants. Table A provides the RNA sequences of miRNA recognition sites recognized and cleaved by mature miRNAs specifically expressed in maize female reproductive tissue (e. g., ovule, embryo). Table B provides the RNA sequences of miRNA or siRNA recognition sites recognized and cleaved by mature miRNAs specifically expressed in maize male reproductive tissue (e. g., pollen, tassel). Table C provides DNA sequences encoding “male tissue-specific siRNA elements” (see U.S. Pat. No. 9,139,838, incorporated herein by reference) which can similarly be integrated into a maize genome so that a transcript including one or more of these male tissue-specific siRNA elements is suppressed in maize male reproductive tissue. Integration into the maize genome of one or more DNA sequences encoding these small RNA (miRNA or siRNA) recognition sites is broadly useful for placing a transcript that includes one or more of these small RNA recognition sites under regulation by the mature small RNA(s) corresponding to the recognition site, and resulting in tissue-specific suppression of the transcript in male or female reproductive tissue. In a broader context, integration of DNA encoding one or more small RNA (e. g., miRNA or siRNA) recognition site into genomic sequence encoding a transcript of interest is useful for placing that transcript under regulation of the corresponding small RNA; depending on the expression pattern of the corresponding small RNA, this allows, e. g., specific spatial or temporal or developmental expression of the transcript.

TABLE A

| | RNA sequence of recognition site |
|---|---|
| | corresponding to mature miRNA |
| SEQ ID | expressed in maize female |
| NO: | reproductive tissue |
| SEQ ID | GUGCUCUCUCUCUUCUGUCA |
| NO: 954 | |
| SEQ ID | CUGCUCUCUCUCUUCUGUCA |
| NO: 955 | |
| SEQ ID | UUGCUUACUCUCUUCUGUCA |
| NO: 956 | |
| SEQ ID | CCGCUCUCUCUCUUCUGUCA |
| NO: 957 | |
| SEQ ID | UGGAGCUCCCUUCAUUCCAAU |
| NO: 958 | |
| SEQ ID | UCGAGUUCCCUUCAUUCCAAU |
| NO: 959 | |
| SEQ ID | AUGAGCUCUCUUCAAACCAAA |
| NO: 960 | |
| SEQ ID | UGGAGCUCCCUUCAUUCCAAG |
| NO: 961 | |
| SEQ ID | UAGAGCUUCCUUCAAACCAAA |
| NO: 962 | |
| SEQ ID | UGGAGCUCCAUUCGAUCCAAA |
| NO: 963 | |
| SEQ ID | AGCAGCUCCCUUCAAACCAAA |
| NO: 964 | |
| SEQ ID | CAGAGCUCCCUUCACUCCAAU |
| NO: 965 | |
| SEQ ID | UGGAGCUCCCUUCACUCCAAU |
| NO: 966 | |
| SEQ ID | UGGAGCUCCCUUCACUCCAAG |
| NO: 967 | |
| SEQ ID | UGGAGCUCCCUUUAAUCCAAU |
| NO: 968 | |
| SEQ ID | UUGGGAUGAAGCCUGGUCCGG |
| NO: 969 | |
| SEQ ID | CUGGGAUGAAGCCUGGUCCGG |
| NO: 970 | |
| SEQ ID | CUGGAAUGAAGCCUGGUCCGG |
| NO: 971 | |
| SEQ ID | CGGGAUGAAGCCUGGUCCGG |
| NO: 972 | |
| SEQ ID | GAGAUCAGGCUGGCAGCUUGU |
| NO: 973 | |
| SEQ ID | UAGAUCAGGCUGGCAGCUUGU |
| NO: 974 | |
| SEQ ID | AAGAUCAGGCUGGCAGCUUGU |
| NO: 975 | |

TABLE B

| | RNA sequence of recognition |
|---|---|
| | site corresponding to mature |
| SEQ ID | miRNA expressed in maize male |
| NO: | reproductive tissue |
| SEQ ID | GUGCUCUCUCUCUUCUGUCA |
| NO: 976 | |
| SEQ ID | CUGCUCUCUCUCUUCUGUCA |
| NO: 977 | |
| SEQ ID | UUGCUUACUCUCUUCUGUCA |
| NO: 978 | |
| SEQ ID | CCGCUCUCUCUCUUCUGUCA |
| NO: 979 | |
| SEQ ID | UGGCAUGCAGGGAGCCAGGCA |
| NO: 980 | |
| SEQ ID | AGGAAUACAGGGAGCCAGGCA |
| NO: 981 | |
| SEQ ID | GGGUUUACAGGGAGCCAGGCA |
| NO: 982 | |
| SEQ ID | AGGCAUACAGGGAGCCAGGCA |
| NO: 983 | |
| SEQ ID | AAACAAUGCGAUCCCUUUGGA |
| NO: 984 | |
| SEQ ID | AGACCAUGCGAUCCCUUUGGA |
| NO: 985 | |
| SEQ ID | GGUCAGAGCGAUCCCUUUGGC |
| NO: 986 | |
| SEQ ID | AGACAAUGCGAUCCCUUUGGA |
| NO: 987 | |
| SEQ ID | UCGUUCAAGAAAGCCUGUGGAA |
| NO: 988 | |
| SEQ ID | CGUUCAAGAAAGCCUGUGGAA |
| NO: 989 | |
| SEQ ID | UCGUUCAAGAAAGCAUGUGGAA |
| NO: 990 | |
| SEQ ID | ACGUUCAAGAAAGCUUGUGGAA |
| NO: 991 | |
| SEQ ID | CGUUCAAGAAAGCCUGUGGAA |
| NO: 992 | |

TABLE C

| | DNA sequence including recognition |
|---|---|
| SEQ | sites corresponding to tassel- |
| ID | specific siRNAs expressed in maize |
| NO: | male reproductive tissue |
| SEQ | GGACAACAAGCACCTTCTTGCCTTGCAAGGCCTCC |
| ID | CTTCCCTATGGTAGCCACTTGAGTGGATGACTTCA |
| NO: | CCTTAAAGCTATTGATTCCCTAAGTGCCAGACATA |
| 993 | ATAGGCTATACATTCTCTCTGGTGGCAACAATGAG |
| | CCATTTTGGTTGGTGTGGTAGTCTATTATTGAGTT |
| | TTTTTTGGCACCGTACTCCCATGGAGAGTAGAAGA |
| | CAAACTCTTCACCGTTGTAGTCGTTGATGGTATTG |
| | GTGGTGACGACATCCTTGGTGTGCATGCACTGGTG |
| | AGTCACTGTTGTACTCGGCG |
| SEQ | GGACAACAAGCACCTTCTTGCCTTGCAAGGCCTCC |
| ID | CTTCCCTATGGTAGCCACTTGAGTGGATGACTTCA |
| NO: | CCTTAAAGCTATCGATTCCCTAAGTGCCAGACAT |
| 994 | |
| SEQ | CTCTTCACCGTTGTAGTCGTTGATGGTATTGGTGG |
| ID | TGACGACATCCTTGGTGTGCATGCACTGGTGAGTC |
| NO: | ACTGTTGTAC |
| 995 | |
| SEQ | GGACAACAAGCACCTTCTTGCCTTGCAAGGCCTCC |
| ID | CTTCCCTATGGTAGCCACTTGAGTGGATGACTTCA |
| NO: | CCTTAAAGCTATCGATTCCCTAAGTGCCAGACATC |
| 996 | TCTTCACCGTTGTAGTCGTTGATGGTATTGGTGGT |
| | GACGACATCCTTGGTGTGCATGCACTGGTGAGTCA |
| | CTGTTGTAC |

### Example 8

[0360] This example illustrates a method of changing expression of a sequence of interest in a genome, comprising integrating sequence encoded by a polynucleotide (such as a double-stranded DNA, a single-stranded DNA, a single-stranded DNA/RNA hybrid, or a double-stranded DNA/RNA hybrid) donor molecule at the site of at least one double-strand break (DSB) in a genome. More specifically, this non-limiting example illustrates using a ribonucleoprotein (RNP) including a guide RNA (gRNA) and a nuclease to effect a DSB in the genome of a monocot plant, and integration of sequence encoded by a polynucleotide molecule at the site of the DSB, wherein sequence encoded by the polynucleotide molecule includes a sequence recognizable by a specific binding agent, and wherein contacting the integrated sequence encoded by polynucleotide molecule with the specific binding agent results in a change of expression of a sequence of interest. In this particular example, sequence encoded by the polynucleotide molecule is integrated at a DSB located in non-coding genomic sequence (i. e., in a promoter region), the sequence recognizable by a specific binding agent includes an endogenous maize enhancer element that was identified by homology to a bacterial enhancer element and that in maize cells demonstrated at least partial responsiveness to auxin, the specific binding agent is an auxin, and the change of expression is upregulation of the sequence of interest.

[0361] The ocs enhancer element is a 16 nucleotide sequence, ACGTAAGCGCTTACGT (SEQ ID NO:341) that was originally identified from the 5′ untranslated region of the octopine synthase gene of the soil bacterium Agrobacterium sp., and is a palindromic sequence, i. e., has a reverse complement that is the exact same nucleotide sequence. A 16 base-pair dsDNA molecule having one strand with the sequence of SEQ ID NO:341 and the other strand being the reverse complement was designed. Endogenous maize sequences having homology to the bacterial enhancer sequence were identified from Zea mays B73 genomic data, including the 15 nucleotide sequence, ACGTAAGCGCTTACG (SEQ ID NO:342, located on chromosome 6) and the 12 core element nucleotide sequence, GTAAGCGCTTAC (SEQ ID NO:343). The 12 core element nucleotide sequence of SEQ ID NO:341 is present at several locations in the corn genome. For example, it can be found at several chromosomal locations of the maize variety B73. According to the B73v4 version of the genomic sequences (available on the https world wide web internet site maizegdb.org/genome/assembly/Zm-B73-REFERENCE-GRAMENE-4.0 and hereinafter referred to as “B73v4 maize genome”), SEQ ID NO:1 can be found on Chr3 coordinates 1,063,395 . . . 1,063,406 (intron of Zm00001d039287), on Chr3 coordinates 12,253,969 . . . 12,253,980 (immediately downstream of Zm00001d039695), on Chr3 coordinates 12,265,615 . . . 12,265,626 (intron of Zm00001d039695), on Chr3 coordinates 12,277,428 . . . 12,277,439 (intron of Zm00001d039695), on Chr3 coordinates 147,698,750 . . . 147,698,761 (not within 2 kb of an annotated gene model), on Chr6, coordinates 107,132,183 . . . 107,132,194 (about 2 kb downstream of Zm00001d036949), on Chr10, coordinates 53,761,662 . . . 53,761,673 (not within 2 kb of an annotated gene model).

[0362] These sequences were used to design a first chemically modified dsDNA molecule of 15 base-pairs (with one strand having the sequence of SEQ ID NO:342 and the other strand being the reverse complement) and a second dsDNA molecule of 12 base-pairs (with one strand having the sequence of SEQ ID NO:343 and the other strand being the reverse complement), respectively. For comparison, the 34 base-pair dsDNA (“3×DR5”) molecule (with strands having the sequences of SEQ ID NO:306 and SEQ ID NO:307), which contains three copies of an auxin response element (SEQ ID NO:308), was used. All dsDNA molecules were purchased from Integrated DNA Technologies, Coralville, IA. In all cases, each strand was phosphorylated on the 5′ end and contained two phosphorothioate linkages at each terminus (i. e., the two linkages between the most distal three bases on either end of the strand).

[0363] Experimental details were similar to those described, e. g., in Examples 3, 4, and 5. The target gene selected for editing was non-coding sequence, in this case the partial promoter sequence (sequence upstream of the transcription start site) of the maize (Zea mays) Lc gene (see www[dot]maizegdb[dot]org/gene_center/gene/GRMZM5G822829) having the sequence of SEQ ID NO:305; and guide RNA (crRNA) sequences were designed to edit this non-coding sequence.

[0364] Maize protoplasts were prepared as described, e. g., in Examples 1, 3, 4, and 5. A ribonucleoprotein (RNP) was prepared with Cas9 nuclease (Aldevron, Fargo, ND) and a guide RNA complex of a crRNA (ZmLc Pro-1) having the sequence of SEQ ID NO:306 and a tracrRNA (both purchased from Integrated DNA Technologies, Coralville, IA). Each dsDNA molecule was added at a concentration of 1 nanomolar together with the RNP. The transfection procedures for editing the target gene Lc in the maize protoplasts were otherwise identical to those described in Examples 4 and 5.

[0365] An experiment was designed similar to that described in Example 5; sequences encoded by dsDNA molecules were integrated at the site of a DSB in promoter sequence operably linked to the gene of interest (the endogenous maize Lc gene). If the dsDNA molecule contained an auxin-responsive sequence, in the presence of an exogenously provided auxin (2, 4-dichlorophenoxyacetic acid) in the culture medium, expression of the gene of interest (the Lc gene) was expected to increase in cells that had the dsDNA molecule integrated into their genome, relative to that in cells that did not have the dsDNA molecule integrated into their genome. Quantitative RT-PCR was employed on three technical replicates per treatment to measure the relative expression of the Lc gene. Controls were cells that had been subjected to the transfection procedure without an RNP. Results are provided in Table 3 with Lc gene expression levels normalized to tubulin. As previously demonstrated in Example 5, integration of the 3×DR5 dsDNA sequence into the Lc promoter region resulted in very strong upregulation of Lc expression in the presence of auxin. The 16-nucleotide Agrobacterium ocs enhancer sequence (SEQ ID NO:341) increased expression of the Lc gene relative to the control by about 6-fold in the absence of auxin, and by about 11-fold in the presence of auxin. In spite of its considerably truncated length, the 12-nucleotide endogenous maize sequence SEQ ID NO:343 similarly increased expression of the Lc gene relative to the control by about 4-fold in the absence of auxin, and by about 6-fold in the presence of auxin. In contrast, in the absence of auxin, the 15-nucleotide endogenous maize sequence SEQ ID NO:342 did not increase expression of the Lc gene relative to the control whether or not auxin was present. These data demonstrate sequence encoded by that a dsDNA molecule only 12 base-pairs in length and including a strand with the sequence of an endogenous maize nucleotide sequence (SEQ ID NO:343), could be integrated at a DSB introduced into the 5′ untranslated (promoter) region of a gene of interest (target gene) and was capable of enhancing expression of the gene of interest by several fold in a partially auxin-dependent manner.

TABLE 3

| | dsDNA | WITHOUT AUXIN | | WITH AUXIN | |
|---|---|---|---|---|---|
| | (SEQ ID | Lc relative | standard | Lc relative | standard |
| Treatment | NO:) | expression | deviation | expression | deviation |
| No RNP | — | 1.0 | 0.05 | 1.0 | 0.7 |
| No dsDNA | — | 0.6 | 0.12 | 0.7 | 0.01 |
| 3x DR5 | 306, 307 | 0.7 | 0.25 | 20.2 | 6.2 |
| 16 nt OCS | 341 | 6.0 | 0.62 | 10.6 | 1.25 |
| 15 nt OCS | 342 | 0.5 | 0.14 | 1.8 | 0.11 |
| 12 nt OCS | 343 | 4.4 | 0.30 | 6.2 | 0.33 |

[0366] Similar genomic modification is carried out in maize whole plants or in maize plant tissues using procedures as described in Examples 31-34.

### Example 9

[0367] This example illustrates a method of modulating expression of a sequence of interest in a genome, comprising introducing at least one double-strand break (DSB) into the 5′ untranslated or promoter region and integrating sequence encoded by a polynucleotide (such as a double-stranded DNA, a single-stranded DNA, a single-stranded DNA/RNA hybrid, or a double-stranded DNA/RNA hybrid) donor molecule at the site of the DSB. More specifically, this non-limiting example illustrates a method to upregulate the expression level of a sequence of interest by integrating an expression-enhancing element at the site of a DSB in the 5′ untranslated or promoter region of a sequence of interest, whereby the expression level of the sequence of interest is increased, relative to a reference expression level (e. g., the expression level of the sequence of interest without the expression-enhancing element integrated into the 5′ untranslated or promoter region of the sequence of interest). By “expression-enhancing element” is meant at least one contiguous sequence of nucleotides that is capable of activating or increasing transcription of a gene or sequence of interest (which can be coding, non-coding, or a combination of coding and non-coding sequence). Embodiments of expression-enhancing elements include those that are located cis to the sequence of interest, and that can be located upstream (5′ to) or downstream (3′ of) the sequence of interest; if located upstream of the sequence of interest, an expression-enhancing element can be located within a promoter region, or outside of (even several hundred or thousand nucleotides upstream from) the promoter region. In some embodiments, the expression-enhancing element is one that provides a constitutive increase in expression levels of the sequence of interest. In other embodiments, the expression-enhancing element is one that provides a non-constitutive (e. g., tissue-specific, temporally specific, developmentally specific, inducible by or responsive to a physical influence such as light intensity or quality, day length, temperature levels, small molecules or ligands or hormones, transcription factors, water availability, or nutrient availability) change in expression levels of the sequence of interest. The expression level of the sequence of interest is estimated by any suitable technique, such as by measuring transcript abundance (e. g., by quantitative PCR) or (for sequences of interest that encode a protein) by measuring protein abundance (e. g., by Western blots). The method further provides the ability to adjust the expression of an endogenous gene or sequence of interest to a desired level under given conditions, by selecting a particular expression-enhancing element and the location of its integration upstream of (5′ to) the TSS of the endogenous gene or sequence of interest. In embodiments, the degree of increase in expression level is selected by the proximity of the DSB (and of the integrated expression-enhancing element) to the transcription start site (TSS) of the sequence of interest. The more proximal the integrated expression-enhancing element is to the TSS, the greater is the increase in expression level; an expression-enhancing element integrated at locations more distal to the TSS provides a correspondingly lowered increase in expression level.

[0368] The following non-limiting example illustrates using a ribonucleoprotein (RNP) including a guide RNA (gRNA) and a nuclease to introduce a DSB in the promoter region of a protein-coding gene, integration of at least one expression-enhancing element (using a chemically modified double-stranded DNA encoding multiple copies of the auxin response element DR5) at the site of the DSB, wherein the at least one expression-enhancing element provides a non-constitutive increase in expression of the gene—in this case an increase in expression that is responsive to the presence of a hormone (auxin).

[0369] Experimental details were similar to those described in Examples 3, 4, 5, and 6. The target gene selected for editing was non-coding sequence, in this case the partial promoter sequence (sequence directly upstream of the transcription start site) of the maize (Zea mays) Lc gene (see www[dot]maizegdb[dot]org/gene_center/gene/GRMZM5G822829) with the sequence of SEQ ID NO:305; and guide RNA (crRNA) sequences were designed to edit this non-coding sequence.

[0370] Maize A188 protoplasts were prepared as described in Examples 1, 3, 4, 5, and 6. Ribonucleoproteins (RNPs) were prepared with Cas9 nuclease (Aldevron, Fargo, ND) and guide RNA complexes. Three guide RNA complexes were made with a crRNA and a tracrRNA (crRNAs and tracrRNA were purchased from Integrated DNA Technologies, Coralville, IA); the first guide RNA complex used a crRNA (ZmLc Pro-1) having the sequence GCUCCUCACUAGCUACCAAGGUUUUAGAGCUAUGCU (SEQ ID NO:306); the second guide RNA complex used a crRNA (ZmLc Pro-2) having the sequence AUAGAGAGAGAGAAAAAGAGGUUUUAGAGCUAUGCU (SEQ ID NO:344) and the third guide RNA complex used a crRNA (ZmLc Pro-3) having the sequence CUCCAAGUGACCGAGCAAGAGUUUUAGAGCUAUGCU (SEQ ID NO:334). These guides were designed to respectively effect a DSB at 173 (ZmLc Pro-1), 272 (ZmLc Pro-3), or 415 (ZmLc Pro-2) nucleotides upstream of (5′ to) the TSS of the Lc coding sequence.

[0371] The transfection procedures for editing the target gene Lc in the maize protoplasts were similar to those described in Example 3, 4, and 5. Three different expression-enhancing elements (each including a different copy number of the auxin response element DR5 having the sequence ccttttgtcgg (SEQ ID NO:308)) were integrated at the site of a DSB introduced into the Lc promoter region at one of three specific locations upstream of (5′ to) the Lc TSS. The three dsDNA molecules (“3×DR5”, (“6×DR5”, and (“9×DR5”) described in Example 5 and encoding different copy numbers of DR5 were used, with each dsDNA added together with the RNP. All dsDNA molecules were purchased from Integrated DNA Technologies, Coralville, IA. In all cases, each strand was phosphorylated on the 5′ end and contained two phosphorothioate linkages at each terminus (i. e., the two linkages between the most distal three bases on either end of the strand). Experimental controls including no dsDNA samples (i. e., no expression-enhancing element integrated) including the RNP only (Cas9 and guide RNA complex but no dsDNA molecule), as well as controls consisting of samples treated with Cas9 nuclease only (no guide RNA, no dsDNA) and null samples (no nuclease, guide RNA, or dsDNA). As the culture medium contained an herbicide (2, 4-dichlorophenoxyacetic acid) having auxin-like properties, expression of the endogenous maize Lc gene was expected to increase in cells that had any of the expression-enhancing elements integrated into the endogenous Lc promoter region, relative to that in cells that did not have an expression-enhancing element integrated into the endogenous Lc promoter region.

[0372] Quantitative RT-PCR was employed on three technical replicates per treatment to measure the relative expression of the Lc gene. Results (mean of triplicates, standard deviation) are provided in Table 4 with relative Lc gene expression levels normalized to tubulin. The data indicate that integration of the expression-enhancing elements (including multiple copies of the auxin response element DR5) upstream of (5′ to) the transcription start site of the Lc gene resulted in an increased expression of the Lc transcript in the presence of an exogenously provided auxin (included in the medium); this increase was greatest for the 3×DR5 element. The degree of increase in expression was also observed to lessen as the integration location of the expression-enhancing element was moved further from (more distal to) the TSS; for example, the 3×DR5 element provided an increase in expression of 3863-fold, 2420-fold, or 1314-fold relative to the Cas9 nuclease control (no guide RNA and no dsDNA) when located at 173, 272, or 415 nucleotide positions upstream of the TSS, respectively. In combination, the data indicate that the degree of increase in expression can be optimized by selecting the type of expression-enhancing element as well as the location where the expression-enhancing element(s) is (are) integrated, relative to the location of the sequence of interest.

TABLE 4

| | ZmLc-Pro1 | | ZmLc-Pro3 | | ZmLc-Pro2 | | | |
|---|---|---|---|---|---|---|---|---|
| | (173 nt from TSS) | | (272 nt from TSS) | | (415 nt from TSS) | | | |
| | Relative | | Relative | | Relative | | Relative | |
| dsDNA | expression | SD | expression | SD | expression | SD | expression | SD |
| 3xDR5 | 3863 | 174 | 2420 | 41 | 1314 | 77 | — | — |
| 6xDR5 | 1479 | 75 | 1496 | 90 | 273 | 12 | — | — |
| 9xDR5 | 1031 | 28 | 823 | 9.0 | 101 | 2.8 | — | — |
| RNP only | 12.7 | 2.6 | 9.0 | 1.4 | 11.2 | 1.2 | — | — |
| Cas9 | — | — | — | — | — | — | 1.0 | 0.25 |
| nuclease | | | | | | | | |
| only | | | | | | | | |
| Null | — | — | — | — | — | — | 0.8 | 0.4 |

[0373] Samples from the treatments with the guide complexes ZmLc-Pro1 and ZmLc-Pro3 were subjected to next-generation sequencing analysis to quantify editing efficiency. The primers for sequencing included the forward primer having SEQ ID NO:313 and the reverse primer having SEQ ID NO:314) for an expected amplicon size of 226 base-pairs (SEQ ID NO:315). Results are provided in Table 5.

TABLE 5

| | | Editing | Editing | |
|---|---|---|---|---|
| | | efficiency at | efficiency at | dsDNA |
| Guide RNA | | 173 nt from | 272 nt from | insertion |
| complex | dsDNA | TSS | TSS | efficiency |
| ZmLc-Pro1 | 3xDR5 | 34% | 0% | 21% |
| (173 nt from TSS) | | | | |
| | 6xDR5 | 25% | 0% | 3% |
| | 9xDR5 | 11% | 0% | 0% |
| | none | 41% | 0% | 0% |
| ZmLc-Pro3 | 3xDR5 | 1% | 17% | 11% |
| (272 nt from TSS) | | | | |
| | 6xDR5 | 1% | 15% | 0% |
| | 9xDR5 | 2% | 10% | 0% |
| | RNP | 0% | 23% | 0% |
| Cas9 nuclease only | — | 9% | 0% | 5% |
| Null | — | 7% | 0% | 3% |

[0374] In a second experiment following the same general procedures described above, maize A188 protoplasts were transfected with the guide RNA complex including the “ZmLc Pro-3” crRNA (SEQ ID NO:334) complexed with a tracrRNA (Integrated DNA Technologies, Coralville, IA); this guide complex was designed to effect a DSB at 272 nucleotides upstream of (5′ to) the TSS of the Lc coding sequence. In one set of samples, an expression-enhancing element in the form of the 34 base-pair dsDNA molecule “3×DR5” (with strands having the sequences of SEQ ID NO:306 and SEQ ID NO:307), which contains three copies of an auxin response element (SEQ ID NO:308), as described in Example 9, was integrated at this DSB. The “3×DR5” dsDNA was purchased from Integrated DNA Technologies, Coralville, IA; each strand was phosphorylated on the 5′ end and contained two phosphorothioate linkages at each terminus (i. e., the two linkages between the most distal three bases on either end of the strand). Maize protoplasts treated with no nuclease, no guide RNA complex, and no dsDNA served as a null control. The transformed protoplasts were then incubated in a maize incubation buffer including the herbicides 2, 4-dichlorophenoxyacetic acid (“2,4-D”) or 3,6-dichloro-2-methoxybenzoic acid (“dicamba”), both of which have auxin-like properties, each at 1 milligram/liter, or including no herbicide as a control. Quantitative RT-PCR was employed on three technical replicates per treatment to measure the relative expression of the Lc gene. Results (mean of triplicates, standard deviation) are provided in Table 6 with relative Lc gene expression levels normalized to tubulin. The data indicate that, without any modification of the Lc promoter, or with only treatment with the RNP to effect a DSB but without integration of the 3×DR5 expression-enhancing element, no difference was seen in Lc transcript expression in the presence or absence of either herbicide. In contrast, integrating the 3×DR5 expression-enhancing element into a DSB in the promoter region of the endogenous Lc gene resulted in an over 200-fold increase in expression of the Lc transcript in the presence of either herbicide, in comparison to expression in the absence of either herbicide.

TABLE 6

| | | | Relative | |
|---|---|---|---|---|
| Transfection | dsDNA | Incubation medium | expression | SD |
| Null control | none | No added herbicide | 1.0 | 0.22 |
| Null control | none | 2,4-D | 1.0 | 0.14 |
| Null control | none | Dicamba | 1.0 | 0.019 |
| ZmLc-Pro3 | 3xDR5 | No added herbicide | 9.0 | 0.84 |
| ZmLc-Pro3 | 3xDR5 | 2,4-D | 290 | 31 |
| ZmLc-Pro3 | 3xDR5 | Dicamba | 236 | 47 |
| ZmLc-Pro3 | none | No added herbicide | 1.6 | 0.22 |
| ZmLc-Pro3 | none | 2,4-D | 1.5 | 0.36 |
| ZmLc-Pro3 | none | Dicamba | 1.3 | 0.11 |

[0375] A third experiment demonstrated the use of an expression-enhancing element to provide inducible upregulation of expression for a sequence of interest. Following the same general procedures described above, protoplasts were harvested from leaves of B73 maize plants that had been grown in nitrate-free medium for 13 days. The sequence of interest was an endogenous maize ammonium transporter AMT3 gene (GRMZM2G118950, see www[dot]maizegdb[dot]org/gbrowse?name=GRMZM2G118950), having a promoter sequence of CGATAAACGCCACTAAAAATGGTTTTACGACCGCCAGTATATATCTTCTCTGTACTAGTGTG ATACTATCAGGCCGCATGCAGATTCCTTTCGATTGTTTATAGGGTTTTTTTTTTTATAAAGAC TGCTGGTTTTCAAGCCTTGAATCTTGTAGCTAGGTAGCCAGACCGGTCCCGGCCGGGTCGAG GAAGACGCAAAACTCAGCAAGCACAGTTGTGCTAGCCTGCTAGGCACGGTGTGTAGCAAGA GACAGAAACGAGCGTATAACCATGGCGATTAACTGATAGCTGTGGAATTTTGAGCACATAG TCCTCCAAACATTTGCATTTGTATTGTACTATTGTTTATGTAGCGAAGTTTAAAATGCAGTTT GGTAGGCCTAACCCGCATGCGAGGGCACCGCACAGTGAGGCTGAGGAACGGAACCACTCCA GCTAAGATTCCGCACCGCAGCAACCCTGGGATCCTGCTGTCAGCGCGGGCCGCGGGAGGGG AGATTCACTGGCAGCAGGGCCCCACACCCCTTCCCAGGCTTCCCATCTCAGAAAACAGAAG CCGATCTGTTTTGTTCTGCCGAATCAAAAGTGCGATATGATCGTCATCTCTTCGACAGCACC CGCCCAACCATCTCCTATAAATCCGATCGCCGCCACTGGCCGTTCGTCCCCCATC (SEQ ID NO:345). The nitrate-starved maize protoplasts were transfected with ribonucleoproteins (RNPs) prepared with Cas9 nuclease (Aldevron, Fargo, ND) and guide RNA complexes. Guide RNA complexes were made with three different crRNAs and a tracrRNA (all purchased from Integrated DNA Technologies, Coralville, IA); the first guide RNA complex used a crRNA (AMT3Pro-1) having the sequence CCAGUGAAUCUCCCCUCCCGGUUUUAGAGCUAUGCU (SEQ ID NO:346); the second guide RNA complex used a crRNA (AMT3Pro-2) having the sequence CGUUCCUCAGCCUCACUGUGGUUUUAGAGCUAUGCU (SEQ ID NO:347) and the third guide RNA complex used a crRNA (AMT3Pro-3) having the sequence CAGAAACGAGCGUAUAACCAGUUUUAGAGCUAUGCU (SEQ ID NO:348). These guides were designed to respectively effect a DSB at 147 (AMT3Pro-1), 230 (AMT3Pro-2), and 382 (AMT3Pro-3) nucleotides upstream of (5′ to) the TSS of the AMT3 coding sequence. An inducible expression-enhancing element based on a nitrogen responsive element from Arabidopsis thaliana, AtNRE, was used to design a 43 base-pair dsDNA (purchased from Integrated DNA Technologies, Coralville, IA) having one strand with the sequence (AAGAGATGAGCTCTTGAGCAATGTAAAGGGTCAAGTTGTTTCT, SEQ ID NO:349), annealed to a second strand with the sequence (AGAAACAACTTGACCCTTTACATTGCTCAAGAGCTCATCTCTT, SEQ ID NO:350); each strand was phosphorylated on the 5′ end and contained two phosphorothioate linkages at each terminus (i. e., the two linkages between the most distal three bases on either end of the strand). The NRE dsDNA was integrated at the site of the DSBs introduced into the AMT3 promoter region.

[0376] After approximately 48 hours, samples of the transfected maize cells were treated with either 0.5 millimolar KNO₃ or 0.5 millimolar KCl, incubated for 1 hour, and then harvested for analysis. Quantitative RT-PCR was employed on three technical replicates per treatment to measure the relative expression of the AMT3 gene. Results (mean of triplicates, standard deviation) are provided in Table 7 with relative AMT3 gene expression levels normalized to tubulin. The data indicate that integrating the NRE expression-enhancing element into the promoter region of the endogenous AMT3 gene resulted in an inducible response to nitrate; in the presence of nitrate, expression of the AMT3 transcript was increased by about 25-fold, about 17-fold, or about 8-fold, where the NRE expression-enhancing element was inserted at 147, 230, or 382 nucleotides, respectively, from the TSS of the AMT3 gene. While the endogenous AMT3 gene shows moderate upregulation of expression in the presence of nitrate, integration of the NRE element into the AMT3 promoter region provided a much stronger response induced by nitrate.

TABLE 7

| crRNA | AtNRE insert | Treatment | Relative Expression | SD |
|---|---|---|---|---|
| AMT3Pro-1 | Y | KNO3 | 24.6 | 0.11 |
| AMT3Pro-2 | Y | KNO3 | 17.3 | 0.17 |
| AMT3Pro-3 | Y | KNO3 | 8.03 | 0.32 |
| AMT3Pro-1 | N | KNO3 | 7.95 | 0.26 |
| AMT3Pro-2 | N | KNO3 | 5.54 | 0.28 |
| AMT3Pro-3 | N | KNO3 | 5.49 | 0.23 |
| AMT3Pro-1 | Y | KCl | 0.94 | 0.064 |
| AMT3Pro-2 | Y | KCl | 1.03 | 0.20 |
| AMT3Pro-3 | Y | KCl | 1.29 | 0.079 |
| AMT3Pro-1 | N | KCl | 1.00 | 0.026 |
| AMT3Pro-2 | N | KCl | 1.02 | 0.25 |
| AMT3Pro-3 | N | KCl | 1.00 | 0.036 |

[0377] Similar genomic modification is carried out in maize whole plants or in maize plant tissues using procedures as described in Examples 31-34.

[0378] The data from these various experiments all indicate that the degree of increase in expression of a sequence or gene of interest can be set at a specific level by selecting the type (or copy number) of an expression-enhancing element as well as the location where the expression-enhancing element(s) is (are) integrated, relative to the location of the sequence of interest (e. g., relative to the location of the transcription start site of a sequence of interest). In these non-limiting examples, the expression-enhancing elements were selected for responsiveness to an exogenously provided stimulus (e. g., auxin or nitrate), and further control of expression can thus be achieved by controlling the amount of the stimulus provided. Other embodiments include the use of expression-enhancing elements that are responsive to other stimuli, e. g., transcription factors, signaling molecules such as salicylic acid or jasmonic acid, hormones, metal ions, small molecules or ligands, heat, temperature, and light or light quality; such expression-enhancing elements can be provided, e. g., in the form of sequences encoded by polynucleotide donor molecules (such as those described above under the heading “Polynucleotide Molecules”) that are integrated at the site of one or more DSBs.

[0379] One of skill in the art would recognize that there are alternative methods for introducing DSBs into the genome (e. g., use of CRISPR nucleases other than Cas9, such as Cpf1 (Cas12a) nuclease, a CasY (Cas12d) nuclease, a CasX (Cas12e) nuclease, a C2c1 nuclease, a C2c3 nuclease, Cas12f nuclease, Cas12i nuclease, Cas12j nuclease, zinc-finger nucleases (ZFNs), transcription activator-like effector nucleases (TAL-effector nucleases or TALENs), Argonaute proteins, or a meganuclease or engineered meganuclease) and thus similar embodiments of the approach described herein include use of any of these methods for introducing at least one DSB into a genome, and integration of at least one expression-enhancing element at the location of the at least one DSB.

### Example 10

[0380] This example illustrates a method of simultaneously effecting multiple modifications in a genome (i. e., multiple modifications of at least one sequence of interest in a genome), comprising introducing at least two DSBs into a genome by one or more nucleases, and, optionally, integrating sequence encoded by at least one polynucleotide (such as a double-stranded DNA, a single-stranded DNA, a single-stranded DNA/RNA hybrid, or a double-stranded DNA/RNA hybrid) donor molecule at one or more DSBs. In embodiments, the modifications are effected in two or more sequences or genes of interest. In embodiments, individual DSBs have blunt ends, overhangs or a combination of a blunt end and an overhang. In embodiments, sequences encoded by two or more different polynucleotide donor molecules are integrated at one or more DSBs. In an embodiment, sequences encoded by at least two different polynucleotide donor molecules are integrated at different DSBs. In an embodiment, the polynucleotide donor molecule includes one or more strands containing chemically modified DNA. Embodiments include double-stranded DNA or double-stranded DNA/RNA hybrid molecules, and single-stranded DNA or single-stranded DNA/RNA hybrid donor molecules, the sequence of which in analogous procedures is integrated at the site of at least two DSBs. More specifically, this non-limiting example illustrates using multiple different ribonucleoproteins (RNPs), wherein each RNP includes a guide RNA (gRNA) and a nuclease, to effect multiple DSBs in the genome of a monocot plant, and integration of sequence encoded by a double-stranded DNA (dsDNA) at the location of the multiple DSBs. In this example, two endogenous maize (Zea mays) sequences or genes of interest, Lc (see Examples 5, 6, 8, and 9) and BBM2 (see Example 3), were selected for modification by insertion of an expression-enhancing element at a DSB located in the promoter region of each gene.

[0381] Maize B73 protoplasts were prepared as described in Examples 1, 3, 4, 5, 6, and 9. Ribonucleoproteins (RNPs) were prepared with Cas9 nuclease (Aldevron, Fargo, ND) and guide RNA complexes. Guide RNA complexes were made with crRNAs and a tracrRNA purchased from Integrated DNA Technologies, Coralville, IA. For modifying the promoter of the endogenous maize Lc gene, the crRNA “ZmLc Pro-1” (SEQ ID NO:306, see Example 5) was used; this was designed to effect a DSB 173 nucleotides upstream of (5′ to) the transcription start site (TSS) of the Lc coding sequence. For modifying the promoter of the endogenous maize BBM2 gene, the crRNA “ZmBBM2-2” (SEQ ID NO:31, see Example 3) was used; this was designed to effect a DSB 342 nucleotides upstream of (5′ to) the TSS of the BBM2 coding sequence. An expression-enhancing element in the form of the 34 base-pair dsDNA molecule “3×DR5” (with strands having the sequences of SEQ ID NO:306 and SEQ ID NO:307), which contains three copies of an auxin response element (SEQ ID NO:308), as described in Example 9, was purchased from Integrated DNA Technologies, Coralville, IA; each strand was phosphorylated on the 5′ end and contained two phosphorothioate linkages at each terminus (i. e., the two linkages between the most distal three bases on either end of the strand).

[0382] Following the same general procedures described above (e. g., Examples 3, 4, 5, 6, and 9) the protoplasts were transfected with the RNPs (including the guide RNA complexes), with or without the dsDNA molecule “3×DR5” (see Example 5). Transfections were carried out to deliver the same molar quantity of RNP for each genomic locus targeted for modification. Samples transfected with both the RNP containing the ZmLc Pro-1 guide RNA complex and the RNP containing the ZmBBM2-2 guide complex were thus transfected with twice the amount of nuclease (provided as RNP) as the samples that were transfected with only a single RNP (containing either the ZmLc Pro-1 guide RNA complex or the ZmBBM2-2 guide complex). Maize protoplasts treated with no nuclease, no guide RNA complex, and no dsDNA served as a null control. The transformed protoplasts were then incubated for about 48 hours in a maize incubation buffer including the herbicide 2, 4-dichlorophenoxyacetic acid (“2,4-D”), which has auxin-like properties. Quantitative RT-PCR was employed on three technical replicates per treatment to measure the relative expression of the Lc and BBM2 genes. Results (mean of triplicates, standard deviation) are provided in Table 8 with relative Lc or BBM2 gene expression levels normalized to tubulin. The data indicate that integrating the 3×DR5 expression-enhancing element into the promoter region of either the endogenous Lc gene or the BBM2 gene resulted in an increased expression of that gene in the presence of exogenous auxin, relative to the expression of either gene lacking the promoter modification (integration of the expression-enhancing element). The data also indicate that simultaneous multiple modifications (integration of a dsDNA at a DSB in the promoter region of two different genes) in the maize protoplasts' genome was effected at about the same efficiency as a single modification, as the relative expression of the individual genes in these protoplasts was approximately the same expression level as observed for the same gene in the protoplasts that had only that one gene modified.

TABLE 8

| | | Lc | | BBM2 | |
|---|---|---|---|---|---|
| | | Relative | | Relative | |
| crRNA(s) | dsRNA | Expression | SD | Expression | SD |
| none (null control) | none | 1.01 | 0.16 | 1.01 | 0.13 |
| ZmBBM2-2 | 3xDR5 | 1.03 | 0.12 | 4.62 | 0.52 |
| ZmLc Pro-1 | 3xDR5 | 8.16 | 1.51 | 0.77 | 0.046 |
| ZmBBM2-2 and | none | 1.18 | 0.14 | 0.70 | 0.064 |
| ZmLc Pro-1 | | | | | |
| ZmBBM2-2 and | 3xDR5 | 6.61 | 0.22 | 4.99 | 0.17 |
| ZmLc Pro-1 | | | | | |

[0383] Similar genomic modification is carried out in maize whole plants or in maize plant tissues using procedures as described in Examples 31-34.

[0384] One of skill in the art would recognize that simultaneously effecting multiple DSBs in a genome (e. g., effecting multiple DSBs in a sequence of interest or effecting at least one DSB in each of two or more sequences of interest) can be achieved with alternative methods (e. g., use of CRISPR nucleases other than Cas9, such as Cpf1 (Cas12a) nuclease, a CasY (Cas12d) nuclease, a CasX (Cas12e) nuclease, a C2c1 nuclease, a C2c3 nuclease, Cas12f nuclease, Cas12i nuclease, Cas12j nuclease, zinc-finger nucleases (ZFNs), transcription activator-like effector nucleases (TAL-effector nucleases or TALENs), Argonaute proteins, or a meganuclease or engineered meganuclease) and thus similar embodiments of the approach described herein include use of any of these methods for simultaneously effecting multiple DSBs in a genome, and, optionally, integrating at least one polynucleotide molecule at one or more DSBs.

### Example 11

[0385] This example illustrates a method of changing expression of a sequence of interest in a genome, comprising integrating sequence encoded by a polynucleotide (such as a double-stranded DNA, a single-stranded DNA, a single-stranded DNA/RNA hybrid, or a double-stranded DNA/RNA hybrid) donor molecule, at the site of at least one double-strand break (DSB) in a genome. This example further demonstrates integration of sequences encoded by polynucleotide (such as a double-stranded DNA, a single-stranded DNA, a single-stranded DNA/RNA hybrid, or a double-stranded DNA/RNA hybrid) donor molecules at a DSB in genomic sequence. More specifically, this non-limiting example illustrates using a ribonucleoprotein (RNP) including a guide RNA (gRNA) and a nuclease to effect a DSB in the genome of a monocot plant, and integration of sequence encoded by a polynucleotide donor molecule including a sequence recognizable by a specific binding agent, and wherein contacting the integrated sequence encoded by the polynucleotide donor molecule with the specific binding agent results in a change of expression of a sequence of interest. In this particular example, sequence encoded by the polynucleotide is integrated at a DSB located in non-coding genomic sequence (i. e., in a promoter region), the sequence recognizable by a specific binding agent includes an enhancer element that is responsive to auxin, the specific binding agent is an auxin, and the change of expression is upregulation of the sequence of interest.

[0386] Maize B73 protoplasts were prepared as described in Examples 1, 3, 4, 5, 6, 9, and 10. Ribonucleoproteins (RNPs) were prepared with Cas9 nuclease (Aldevron, Fargo, ND) and a guide RNA complex including the “ZmLc Pro-3” crRNA (SEQ ID NO:334) complexed with a tracrRNA (Integrated DNA Technologies, Coralville, IA); this guide complex was designed to effect a DSB at 272 nucleotides upstream of (5′ to) the TSS of the Lc coding sequence. Three polynucleotides including a sequence recognizable by a specific binding agent were tested for integration at the site of the DSB: (a) a 34 base-pair dsDNA molecule “3×DR5” (with strands having the sequences of SEQ ID NO:306 and SEQ ID NO:307), which contains three copies of an auxin response element (SEQ ID NO:308) (see Example 9); (b) a 34 nucleotide single-stranded DNA (ssDNA) molecule having the sequence 5′-ccgacaaaaggccgacaaaaggccgacaaaaggt-3′ (SEQ ID NO:306) (i. e., equivalent to only a single strand of the “3×DR5” dsDNA molecule); and a 34 base-pair blunt-ended double-stranded DNA/RNA hybrid (analogous to the dsDNA molecule “3×DR5”) formed by annealing a DNA strand having the sequence of and an RNA strand having the sequence of 5′-ACCUUUUGUCGGCCUUUUGUCGGCCUUUUGUCGG-3′ (SEQ ID NO:351). All polynucleotides tested for integration at the DSB were purchased from Integrated DNA Technologies, Coralville, IA; each DNA or RNA strand was phosphorylated on the 5′ end and contained two phosphorothioate linkages at each terminus (i. e., the two linkages between the most distal three bases on either end of the strand).

[0387] Following the same general procedures described above (e. g., Examples 3, 4, 5, 6, and 9) the protoplasts were transfected with the RNPs (including the guide RNA complexes), with or without a dsDNA, ssDNA, or DNA/RNA hybrid polynucleotide for integration. Transfections were carried out to deliver the same molar quantity of polynucleotide for integration. Maize protoplasts treated with no nuclease, no guide RNA complex, and no dsDNA served as a null control. The transformed protoplasts were then incubated for about 48 hours in a maize incubation buffer including the herbicide 2, 4-dichlorophenoxyacetic acid (“2,4-D”), which has auxin-like properties. Quantitative RT-PCR was employed on three technical replicates per treatment to measure the relative expression of the Lc gene. Results (mean of triplicates, standard deviation) are provided in Table 9 with relative Lc gene expression levels normalized to tubulin.

TABLE 9

| | Lc relative | standard |
|---|---|---|
| Conditions | expression | deviation |
| Null (no RNP, no polynucleotide) | 1.00 | 0.11 |
| RNP only | 2.39 | 0.19 |
| RNP + dsDNA | 61.1 | 2.71 |
| RNP + ssDNA | 107.5 | 2.28 |
| RNP + DNA/RNA hybrid | 6.79 | 0.30 |

[0388] As in previous Examples, the data indicate that integration of sequence encoded by a dsDNA including the 3×DR5 expression-enhancing element into the promoter region of the endogenous Lc gene resulted in increased expression in the presence of exogenous auxin, about sixty-fold increased expression relative to the expression of the Lc gene lacking the promoter modification (integration of an expression-enhancing element). Surprisingly, the data also indicate that integration of sequence encoded by a ssDNA polynucleotide containing the 3×DR5 expression-enhancing element appeared to provide an even greater increase in relative expression of the Lc gene in the presence of endogenous auxin, well over 100-fold increased relative expression, or nearly twice the increase in relative expression observed with that obtained with the dsDNA 3×DR5 polynucleotide. Furthermore, the data also indicate that integration of sequence encoded by a double-stranded DNA/RNA hybrid polynucleotide containing the 3×DR5 expression-enhancing element also increased relative expression of the Lc gene in the presence of endogenous auxin by at least a few fold relative to the expression of the Lc gene lacking the promoter modification (integration of an expression-enhancing element).

[0389] A second experiment to compare the effects of dsDNA and ssDNA polynucleotides was performed using essentially the same procedures as above, using maize B73 protoplasts and ribonucleoproteins (RNPs) prepared with Cas9 nuclease (Aldevron, Fargo, ND) and a guide RNA complex including the “ZmLc Pro-3” crRNA (SEQ ID NO:334) complexed with a tracrRNA (Integrated DNA Technologies, Coralville, IA). This experiment included longer ssDNA polynucleotides encoding the 6×DR5 or 9×DR5 sequences (see Examples 5, 6, and 9). Maize protoplasts treated with no nuclease, no guide RNA complex, and no dsDNA served as a null control. The transformed protoplasts were then incubated for about 48 hours in a maize incubation buffer including the herbicide 2, 4-dichlorophenoxyacetic acid (“2,4-D”), which has auxin-like properties. Quantitative RT-PCR was employed on three technical replicates per treatment to measure the relative expression of the Lc gene. Results (mean of triplicates, standard deviation) are provided in Table 10 with relative Lc gene expression levels normalized to tubulin. The results indicated that, in each case, the integration of sequence encoded by the ssDNA polynucleotide into the Lc promoter region resulted in greater upregulation of Lc relative expression; in this experiment, the increased upregulation of Lc expression was most marked in the 3×DR5 and 9×DR5 cases (an approximately 2-fold increase in upregulation effected by the ssDNA polynucleotides, compared to that observed with the dsDNA equivalents). This suggests that ssDNA polynucleotides are especially of use when integrating longer nucleotide sequences (e. g., of more than 100 contiguous nucleotides).

TABLE 10

| Conditions | Lc relative expression | standard deviation |
|---|---|---|
| Null | 1.00 | 0.07 |
| RNP only | 1.52 | 0.05 |
| 3xDR5, ssDNA | 61.0 | 2.6 |
| 3xDR5, dsDNA | 34.7 | 3.0 |
| 6xDR5, ssDNA | 46.8 | 1.8 |
| 6xDR5, dsDNA | 43.3 | 2.2 |
| 9XDR5, ssDNA | 19.6 | 0.6 |
| 9XDR5, dsDNA | 8.9 | 0.9 |

[0390] Similar genomic modification is carried out in maize whole plants or in maize plant tissues using procedures as described in Examples 31-34.

### Example 12

[0391] This example illustrates a method of changing expression of a sequence of interest in a genome, comprising integrating sequence encoded by a polynucleotide (such as a double-stranded DNA, a single-stranded DNA, a single-stranded DNA/RNA hybrid, or a double-stranded DNA/RNA hybrid) donor molecule at the site of at least one double-strand break (DSB) in a genome. More specifically, this non-limiting example illustrates using a ribonucleoprotein (RNP) including a guide RNA (gRNA, in this case a Cpf1 crRNA without a tracrRNA) and a Cpf1 nuclease to effect a DSB in the genome of a plant, and integration of sequence encoded by a polynucleotide donor molecule including a sequence recognizable by a specific binding agent, wherein contacting the integrated sequence encoded by polynucleotide with the specific binding agent results in a change of expression of a sequence of interest. In this particular example, sequences encoded by dsDNAs either with blunt ends or with overhangs, and encoding an auxin-responsive enhancer element, were integrated at a DSB located in non-coding genomic sequence (i. e., in the promoter region of a sequence of interest); in the presence of auxin, expression of the sequence of interest was increased.

[0392] Maize B73 protoplasts were prepared as described in Examples 1, 3, 4, 5, 6, 7, 10, and 11. Ribonucleoproteins (RNPs) were prepared with Cpf1 nuclease (Aldevron, Fargo, ND) and a “Cpf1 LcPro3” crRNA with the sequence 5′-UGGACAGAGCUCCAAGUGACC-3′ (SEQ ID NO:352). Two polynucleotides including a sequence recognizable by a specific binding agent were tested for integration at the site of the Cpf1-effected DSB. The first polynucleotide was a 34 base-pair blunt-ended dsDNA molecule “3×DR5” (with strands having the sequences of SEQ ID NO:306 and SEQ ID NO:307), which contains three copies of an auxin response element (SEQ ID NO:308) (see Example 9); each DNA strand was phosphorylated on the 5′ end and contained two phosphorothioate linkages at each terminus (i. e., the two linkages between the most distal three bases on either end of the strand). The second polynucleotide was a “sticky-ended” dsDNA molecule with overhangs at each terminus, produced by annealing (a) a forward DNA strand having the sequence 5′-TCGGTCCGACAAAAGGCCGACAAAAGGCGGACAAAAGG-3′ (SEQ ID NO:353) and containing four phosphorothioate linkages at the 5′ end (i. e., the four linkages between the five most 5′ bases of the strand) and two phosphorothioate linkages at the 3′ end (i. e., the two linkages between the three most 3′ bases of the strand) and (b) a reverse DNA strand having the sequence 5′-ACCGACCTTTTGTCGGCCTTTTGTCGGCCTTTTGTCGG-3′ (SEQ ID NO:354) and containing five phosphorothioate linkages at the 5′ end (i. e., the five linkages between the six most 5′ bases of the strand) and two phosphorothioate linkages at the 3′ end (i. e., the two linkages between the three most 3′ bases of the strand); each DNA strand was phosphorylated on the 5′ end and. All polynucleotides tested for integration at the DSB were purchased from Integrated DNA Technologies, Coralville, IA.

[0393] Following the same general procedures described above (e. g., Examples 3, 4, 5, 6, 9, 10, and 11) the protoplasts were transfected with the RNPs (including the guide RNA complexes), with or without a blunt-ended or a “sticky-ended” dsDNA polynucleotide for integration. Maize protoplasts treated with no nuclease, no guide RNA complex, and no dsDNA served as a null control. The transformed protoplasts were pelleted by centrifugation at 1200 rpm, resuspended in 1 milliliter maize incubation buffer (see Example 2) including the herbicide 2, 4-dichlorophenoxyacetic acid (“2,4-D”) with 50 millimolar CaCl₂ added), and plated in 6-well plates. The plates were incubated 1 hour at 37 degrees Celsius, and then incubated for about 48 hours at 26 degrees Celsius in the dark. Results are provided in Table 11. The data indicate that the sticky-ended dsDNA was inserted at a higher percentage than was the blunt-ended dsDNA. NGS sequencing results showed that the stick-ended dsDNA was inserted in the correct orientation to a much greater degree than was the blunt-ended dsDNA. This observation suggests that using a nuclease (such as Cpf1) that effects a double-strand break with overhangs (or, alternatively, using two nucleases to effect two DSBs between which genomic sequence is excised, wherein at least one of the nucleases effects a DSB with overhangs) results in an asymmetry at the locus for insertion of a nucleotide sequence encoded by a polynucleotide donor molecule that provides an opportunity for insertion of the nucleotide sequence in the correct orientation.

TABLE 11

| | | | +Orientation |
|---|---|---|---|
| | % correct | % correct | (% of |
| Conditions | editing | insertion | Insertion) |
| Null (no RNP, no polynucleotide) | 0 | 0 | |
| RNP only | 72 | — | |
| RNP + blunt-ended dsDNA | 72 | 9 | 38.9 |
| RNP + sticky-ended dsDNA | 68 | 15 | 97.1 |

[0394] Similar genomic modification is carried out in maize whole plants or in maize plant tissues using procedures as described in Examples 31-34.

### Example 13

[0395] This example illustrates a method of providing a plant cell having a modified phenotype, the method including introducing multiple double-strand breaks (DSBs) into the genome, in this case into non-translated genomic sequence (the 5′ untranslated or promoter region) of multiple genes, and integrating at the site of the DSBs a nucleotide sequence encoded by a polynucleotide (such as a double-stranded DNA, a single-stranded DNA, a single-stranded DNA/RNA hybrid, or a double-stranded DNA/RNA hybrid) donor molecule. In this non-limiting example, multiple genomic modifications (“multiplexed edits”) are effected in a maize cell by using multiple ribonucleoproteins (RNPs), each including a nuclease and a guide RNA (gRNA), to introduce a DSB at a predetermined site in the promoter region of each of three different maize genes involved in nitrogen uptake and utilization, and integrating a nitrate-responsive element sequence (encoded by a chemically modified double-stranded DNA) at the site of each DSB. The effects of the resulting multiple genomic modifications include both a non-constitutive (nitrate-responsive) increase in expression of each of the three modified genes as well as an increase in expression of an unmodified gene, AMT3.

[0396] The three endogenous maize genes selected for modification were a maize transcription factor, Dof1 (see, e. g., www[dot]uniprot[dot]org/uniprot/Q1HFQ1; Kurai et al. (2001) Plant Biotechnol. J., 9:826-837); a maize nitrogen transporter, NRT2.2 (see, e. g., www[dot]uniprot[dot]org/uniprot/Q53CL7); and a maize glutamine synthetase, Gln1.4 (see, e. g., www[dot]uniprot[dot]org/uniprot/B9TSW5). The nitrate-responsive maize ammonium transporter AMT3 gene (GRMZM2G118950, see www[dot]maizegdb[dot]org/gbrowse?name=GRMZM2G118950) was chosen as an unmodified read-out gene.

[0397] Maize B73 protoplasts were harvested from leaves of B73 maize plants that had been grown in nitrate-free medium for 13 days (see Example 9). Three different ribonucleoproteins (RNPs) were prepared with Cas9 nuclease (Aldevron, Fargo, ND) and one of three guide RNA complexes, each including a different crRNA complexed with a tracrRNA (Integrated DNA Technologies, Coralville, IA). The three crRNAs were “NRT2.2_Pro1” with the sequence CAAACAAAAAAGAAUGCAUGGUUUUAGAGCUAUGCU (SEQ ID NO:361), “Gln1-4_Pro-1” with the sequence UGUAUCCGUAUUUAUACGUGGUUUUAGAGCUAUGCU (SEQ ID NO:362), and “Dof1_Pro-1” with the sequence GACGCGAGUGGGGGCCCACGGUUUUAGAGCUAUGCU (SEQ ID NO:363). A nitrogen responsive element (AtNRE, see Example 9) encoded by a polynucleotide donor molecule was provided as a 43 base-pair chemically modified dsDNA (purchased from Integrated DNA Technologies, Coralville, IA) having a first strand with the sequence of SEQ ID NO:349 annealed to a second strand with the sequence of SEQ ID NO:350); each strand was phosphorylated on the 5′ end and contained two phosphorothioate linkages at each terminus (i. e., the two linkages between the most distal three bases on either end of the strand).

[0398] Following the same general procedures described above (e. g., Examples 3, 4, 5, 6, 9, and 11) the protoplasts were transfected with the RNPs. Maize protoplasts treated with no nuclease, no guide RNA complex, no salmon sperm DNA, and no polynucleotide donor molecule served as a null control. The different guide RNA (gRNA) complexes were prepared by mixing equal amounts of tracrRNA and the gene-specific CRISPR crRNA: 30 microliters of 100 micromolar crRNA were mixed with 30 microliters of 100 micromolar tracrRNA, heated at 95 degrees Celsius for 5 minutes, and then cooled to room temperature. To the cooled gRNA solution, 100 micrograms Cas9 nuclease (Aldevron, Fargo, ND) was added and the mixture incubated 5 minutes at room temperature to allow the ribonucleoprotein (RNP) complex to form. For three reactions, 35 microliters of an individual (“NRT2.2_Pro1”, “Gln1-4_Pro-1” or “Dof1_Pro-1”) RNP solution were added to 1000 microliters of maize protoplasts (prepared as described in Example 1) in a microfuge tube; in one “multiplexed editing” reaction, 35 microliters of each individual (“NRT2.2 Pro1”, “Gln1-4_Pro-1”, or “Dof1_Pro-1”) RNP solution were added to 1000 microliters of maize protoplasts in a microfuge tube. All tubes except for the null control also received 50 microliters (50 micromolar) of the AtNRE polynucleotide donor molecule. Two microliters (20 micrograms) salmon sperm DNA (VWR Cat. No.: 95037-160) and 1.2 milliliters of 40% PEG were added to each tube. The reaction mixtures were mixed gently by tapping and incubated 5 minutes at room temperature. The reactions were stopped by adding 5 milliliters of washing buffer (0.6 molar mannitol, 4 millimolar MES pH 5.7, and 20 millimolar KCl; see Example 1) to each tube and mixed gently by inverting the tube. The tubes were centrifuged 2 minutes at 1200 rpm and the supernatant was then removed. The protoplasts were resuspended in 10 milliliters incubation solution and transferred to 10×10 cm dishes pre-coated with 5% calf serum; the dishes were sealed with Parafilm M® film (Bemis, Oshkosh, WI), incubated 1 hour at 37 degrees Celsius, and then incubated an additional 47 hours at 26 degrees Celsius in the dark. Forty-eight hours after transfection, half of the cells were treated with 0.5 millimolar KNO₃ and half with 0.5 millimolar KCl; cells were incubated 1 hour, and then harvested for analysis.

[0399] Quantitative RT-PCR was employed on three technical replicates per treatment to measure the relative expression of each gene. Results (mean of triplicates, standard deviation) are provided in Table 12 and illustrated in FIG. 2, panels A and B, with relative gene expression levels normalized to tubulin. The data indicate that, without any modifications, the Dof1, NRT2.2, and Gln1.4 genes individually responded to nitrate exposure with an increase in relative expression of about 3- to about 5-fold (Table 12; FIG. 2, panel A). Integrating a nitrogen responsive element (AtNRE) sequence into the promoter region of the Dof1, NRT2.2, and Gln1.4 strongly increased the responsiveness of these genes to nitrate; the NRE-modified genes responded to nitrate exposure with an increase in relative expression of about 12- to about 16-fold (Table 12; FIG. 2, panel A). When the Dof1, NRT2.2, and Gln1.4 genes were modified by multiplexed editing of all three genes together, the result was an additional increase in nitrate response, especially marked in NRT2.2, which responded to nitrate exposure by about 26-fold, or nearly twice the increase in expression observed when NRT2.2 was modified alone (Table 12; FIG. 2, panel A).

[0400] The relative expression of the unmodified, endogenous AMT3 gene was also measured. In cells where the Dof1, NRT2.2, and Gln1.4 genes had not been modified, AMT3 relative expression increased in the presence of nitrate by about 4-fold (Table 12; FIG. 2, panel B). In cells where the Dof1, NRT2.2, and Gln1.4 genes were individually modified, AMT3 relative expression increased in the presence of nitrate by about 12-, about 11-, and about 9-fold, respectively (Table 12; FIG. 2, panel B). In cells where the Dof1, NRT2.2, and Gln1.4 genes were modified by multiplexed editing of all three genes together, AMT3 relative expression increased in the presence of nitrate by about 25-fold (Table 12; FIG. 2, panel B).

TABLE 12

| | | KCl | | KNO₃ | |
|---|---|---|---|---|---|
| | | Relative | | Relative | |
| RNP used | Gene | Expression | SD | Expression | SD |
| Null control | Dof1 | 1.00 | 0.09 | 3.11 | 0.09 |
| (no RNP) | NRT2.2 | 1.00 | 0.05 | 3.76 | 0.10 |
| | Gln1.4 | 1.00 | 0.02 | 5.06 | 0.21 |
| | AMT3 | 1.01 | 0.14 | 3.72 | 0.43 |
| Dof1 | Dof1 | 0.81 | 0.04 | 16.08 | 0.28 |
| | NRT2.2 | 0.52 | 0.06 | 5.70 | 0.38 |
| | Gln1.4 | 0.86 | 0.03 | 7.24 | 0.38 |
| | AMT3 | 1.06 | 0.09 | 12.32 | 0.20 |
| NRT2.2 | Dof1 | 0.88 | 0.12 | 6.86 | 0.42 |
| | NRT2.2 | 0.83 | 0.04 | 13.28 | 0.58 |
| | Gln1.4 | 0.56 | 0.02 | 6.02 | 0.23 |
| | AMT3 | 0.50 | 0.00 | 11.25 | 0.04 |
| Gln1.4 | Dof1 | 1.21 | 0.07 | 5.67 | 0.33 |
| | NRT2.2 | 0.91 | 0.07 | 6.52 | 0.46 |
| | Gln1.4 | 0.89 | 0.02 | 12.04 | 0.11 |
| | AMT3 | 1.38 | 0.16 | 8.70 | 0.14 |
| Multiplexed edits | Dof1 | 0.66 | 0.06 | 17.62 | 1.08 |
| (Dof1, NRT2.2, | NRT2.2 | 0.49 | 0.03 | 25.74 | 2.88 |
| and Gln1.4) | Gln1.4 | 0.60 | 0.29 | 14.05 | 0.53 |
| | AMT3 | 1.12 | 0.19 | 25.01 | 2.03 |

[0401] Similar genomic modification is carried out in maize whole plants or in maize plant tissues using procedures as described in Examples 31-34 and with different nucleases (e.g., Cpf1).

### Example 14

[0402] This example illustrates a method of providing a plant cell having a modified phenotype, the method including integrating at a predetermined genomic locus a nucleotide sequence encoded by a polynucleotide (such as a double-stranded DNA, a single-stranded DNA, a single-stranded DNA/RNA hybrid, or a double-stranded DNA/RNA hybrid) donor molecule. More specifically, this non-limiting example illustrates incorporation of an insulator element in the 5′ untranslated or promoter region of the maize nitrate-responsive gene, AMT3.

[0403] Two different crRNAs and a tracrRNA were purchased from Integrated DNA Technologies, Coralville, IA. The first crRNA (AMT3-Pro1) had the sequence CCAGUGAAUCUCCCCUCCCGGUUUUAGAGCUAUGCU (SEQ ID NO:346), and the second crRNA (AMT3-Pro2) had the sequence CGUUCCUCAGCCUCACUGUGGUUUUAGAGCUAUGCU (SEQ ID NO:347). Guide RNAs made with these crRNAs were designed to respectively effect a DSB at 147 (AMT3Pro-1) or 230 (AMT3Pro-2) nucleotides upstream of (5′ to) the transcription start site of the AMT3 coding sequence. Guide RNA complexes were made by mixing 70 microliters of 100 micromolar tracrRNA and 70 microliters of 100 micromolar crRNA, heating the mixture to 95 degrees Celsius for 5 minutes, removing from the heating block, and allowing the tubes to cool to room temperature on the benchtop.

[0404] The palindromic nucleotide sequence of the insulator was 5′-GAATATATATATATTC-3′ (SEQ ID NO:364, see U.S. Pat. No. 7,605,300, which is incorporated herein by reference) which was encoded on a chemically modified, single-stranded DNA donor molecule that was phosphorylated on the 5′ end and contained two phosphorothioate linkages at each terminus (i. e., the two linkages between the most distal three bases on either end of the strand). One hundred microliters (100 micromolar) of the insulator solution was heated to 95 degrees Celsius for 5 minutes, then the heat was turned off and the solution allowed to slowly cool to room temperature in the block.

[0405] Maize B73 protoplasts were harvested from leaves of B73 maize plants that had been grown in nitrate-free medium for 13 days (see Examples 9 and 13). One milliliter of protoplasts (2×10\hat{ }5 cells per milliliter) was added to each of five reaction tubes. Ribonucleoproteins (RNPs) were prepared by mixing 200 micrograms Cas9 nuclease (Aldevron, Fargo, ND) and 120 microliters of one of the two guide RNA complexes (AMT3Pro-1 crRNA/tracrRNA or AMT3Pro-2 crRNA/tracrRNA), incubating the mixtures for 5 minutes at room temperature. To each RNP solution was added 2 microliters (20 micrograms) of salmon sperm DNA (VWR Cat. No.: 95037-160). Editing experiments were carried out in the five reaction tubes with 70 microliters of an RNP solution, with or without 50 microliters of insulator solution, and sufficient buffer added if necessary to make up a total volume of 120 microliters. Maize protoplasts treated with no nuclease, no guide RNA complex, no salmon sperm DNA, and no polynucleotide donor molecule served as a null control. To each tube was added 1.2 milliliters of 40% PEG; the reaction mixtures were mixed gently by tapping and incubated 5 minutes at room temperature. The reactions were stopped by adding 5 milliliters of washing buffer (0.6 molar mannitol, 4 millimolar MES pH 5.7, and 20 millimolar KCl; see Example 1) to each tube and mixed gently by inverting the tube. The tubes were centrifuged 2 minutes at 1200 rpm and the supernatant was then removed. The protoplasts were resuspended in 6 milliliters incubation solution and transferred to 10×10 cm dishes pre-coated with 5% calf serum; the dishes were sealed with Parafilm M® film (Bemis, Oshkosh, WI), incubated 1 hour at 37 degrees Celsius, and then incubated an additional 47 hours at 26 degrees Celsius in the dark. Forty-eight hours after transfection, half of the plates were treated with 10 millimolar (final concentration) KNO₃ and half with 10 millimolar (final concentration) KCl; cells were incubated 1 hour, and then harvested for analysis.

[0406] Quantitative RT-PCR was employed on three technical replicates per treatment to measure the relative expression of the AMT3 gene. Results (mean of triplicates, standard deviation) are provided in Table 13, with relative AMT3 expression levels normalized to tubulin. The unmodified (native) maize AMT gene is responsive to high nitrate, with an increase in relative expression of about 15-fold, compared to relative expression under low nitrate conditions. Editing with only an RNP (nuclease and guide RNA complex) resulted in decreasing this response to high nitrate to about 10-fold with the AMT3-Pro1 RNP and about 12-fold with the AMT3-Pro2 RNP; this could be attributed to possible disruption of the promoter sequence and consequently possible interference with normal transcription or translation. Integration of the insulator sequence at the AMT3Pro-1-mediated DSB located 147 nucleotides upstream of the TSS of the AMT3 coding region resulted in only about 2-fold increase in relative expression under high nitrate. Integration of the insulator sequence at the AMT3Pro-2-mediated DSB located 230 nucleotides upstream of the TSS of the AMT3 coding region resulted in only about 7-fold increase in relative expression under high nitrate. Thus, integrating the relatively small insulator sequence upstream of the AMT3 TSS reduced the AMT3 gene's induction by nitrate. These results demonstrate the ability of an integrated sequence encoded by a polynucleotide donor molecule to efficiently moderate or decrease a gene's expression, for example, by “insulating” the gene's promoter from upstream enhancer sequences. This approach may also be useful, e. g., in insulating an actively transcribed gene from a epigenetically silenced gene.

TABLE 13

| | KCl | | KNO₃ | |
|---|---|---|---|---|
| | Relative | | Relative | |
| Editing treatment | Expression | SD | Expression | SD |
| Null control (no RNP) | 1.00 | 0.12 | 15.55 | 1.18 |
| AMT3-Pro1 | 1.08 | 0.10 | 10.16 | 0.46 |
| AMT3-Pro1 + Insulator | 1.61 | 0.10 | 2.58 | 0.03 |
| AMT3-Pro2 | 1.69 | 0.21 | 12.33 | 0.60 |
| AMT3-Pro2 + Insulator | 1.71 | 0.06 | 7.15 | 0.26 |

[0407] Similar genomic modification is carried out in maize whole plants or in maize plant tissues using procedures as described in Examples 31-34.

### Example 15

[0408] This example illustrates a method of providing a plant cell having a modified phenotype, the method including effecting a double-strand break (DSB) at a predetermined genomic locus. More specifically, this non-limiting example illustrates effecting a double-strand break (DSB) at one or at multiple predetermined loci within a first gene (FEA3), thereby reducing that gene's expression; this further results in increasing expression of a second gene (WUS), which is normally repressed by the first gene.

[0409] The transcription factor WUSCHL (WUS) is expressed in the organizing center cells below the stem cells in a plant's shoot meristem; WUS expression prevents differentiation of stem cells. WUS activates expression of CLAVATA (CLV) and the CLV signaling pathway, which then controls stem cell proliferation and differentiation. The balance between WUS and CLV is maintained by feedback signaling between the organizing center cells and stem cells. The CLV3 peptide is secreted from stem cells at the tip of the shoot apical meristem, and is bound by CLV1, is a leucine-rich-repeat (LRR) receptor kinase; this results in negative regulation of shoot and floral meristem. Another LRR receptor reported to respond to the CLV3 peptide is FASCIATED EAR3 (FEA3); weak alleles of fea3 have been reported to enhance yield in hybrid maize; see: Je et al. (2016) Nature Genetics, 48:785-791; DOI: 10.1038/ng.3567. Reducing expression of FEA3 is predicted to increase expression of WUS.

[0410] These experiments were carried out to observe the effects of down-regulating or knocking-out expression of FEA3 in maize cells. Two different crRNAs and a tracrRNA were purchased from Integrated DNA Technologies, Coralville, IA. The first crRNA (ZmFea3-1) had the sequence GCGCUCCUUCUCCUCCAUGGGUUUUAGAGCUAUGCU (SEQ ID NO:365), and the second crRNA (ZmFea3-2) had the sequence CCUCGGCGUGGCGCUCUCGGGUUUUAGAGCUAUGCU (SEQ ID NO:366). Guide RNA complexes were made by mixing 60 microliters of 100 micromolar tracrRNA and 60 microliters of 100 micromolar crRNA, heating the mixture to 95 degrees Celsius for 5 minutes, removing from the heating block, and allowing the tubes to cool to room temperature on the benchtop.

[0411] Maize B73 protoplasts were harvested from leaves of B73 maize plants. One milliliter of protoplasts (2×10\hat{ }5 cells per milliliter) was added to each of four reaction tubes. Ribonucleoproteins (RNPs) were prepared by mixing 24 microliters (240 micrograms) Cas9 nuclease (Aldevron, Fargo, ND) and 120 microliters of one of the two guide RNA complexes (AMT3Pro-1 crRNA/tracrRNA or AMT3Pro-2 crRNA/tracrRNA), incubating the mixtures for 5 minutes at room temperature. Editing experiments were carried out in the four reaction tubes with either 72 microliters of one of the two RNP solutions or 72 microliters of both RNP solutions, with sufficient buffer added if necessary to make up a total volume of 144 microliters; 2 microliters (20 micrograms) of salmon sperm DNA (VWR Cat. No.: 95037-160) was added to each tube except for the null control. Maize protoplasts treated with no nuclease, no guide RNA complex, no salmon sperm DNA, and no polynucleotide donor molecule served as a null control. To each tube was added 1.2 milliliters of 40% PEG; the reaction mixtures were mixed gently by tapping and incubated 5 minutes at room temperature. The reactions were stopped by adding 5 milliliters of washing buffer (0.6 molar mannitol, 4 millimolar MES pH 5.7, and 20 millimolar KCl) to each tube and mixed gently by inverting the tube. The tubes were centrifuged 2 minutes at 1200 rpm and the supernatant was then removed. The protoplasts were resuspended in 4 milliliters incubation buffer (see Example 2) including the herbicide 2, 4-dichlorophenoxyacetic acid (“2,4-D”) with 50 millimolar CaCl₂ added) solution. One milliliter of cells from each tube was transferred to a well in a 6-well plate; the remaining 3 milliliters of cells from each tube were plated in four 10×10 cm dishes (all pre-coated with 5% calf serum), with another 3 milliliters of incubation buffer added per dish (for an optimal cell density for incubation). The plate and dishes were sealed with Parafilm M® film (Bemis, Oshkosh, WI), incubated 1 hour at 37 degrees Celsius, and then incubated an additional 47 hours at 26 degrees Celsius in the dark. Forty-eight hours after transfection, cells were harvested for analysis.

[0412] Quantitative RT-PCR was employed on three technical replicates per treatment to measure the relative expression of the FEA3 and WUS1 genes. Results (mean of triplicates, standard deviation) are provided in Table 14, with relative gene expression levels normalized to tubulin. The data show that use of a single RNP (i. e., providing a DSB at a single precise locus in the FEA3 gene), either Fea3-1 or Fea3-2, was sufficient to knock down FEA3 expression by about two-thirds; this further resulted in about a 2-fold increase in WUS expression. Use of both RNPs (i. e., providing a DSB at two precise loci in the FEA3 gene) knocked down FEA3 expression by about four-fifths, and further resulted in strong (about 15-fold) upregulation of WUS expression.

TABLE 14

| | |
|---|---|
| FEA3 | WUS |

| | Relative | | Relative | |
|---|---|---|---|---|
| Treatment | expression | SD | expression | SD |
| Null control | 1.00 | 0.04 | 1.00 | 0.09 |
| Fea3-1 | 0.27 | 0.03 | 2.81 | 0.24 |
| Fea3-2 | 0.31 | 0.02 | 2.10 | 0.20 |
| Fea3 1 + 2 | 0.19 | 0.01 | 15.15 | 2.01 |

[0413] Similar genomic modification is carried out in maize whole plants or in maize plant tissues using procedures as described in Examples 31-34.

### Example 16

[0414] This example illustrates a method of providing a plant cell having a modified phenotype, the method including introducing double-strand breaks (DSBs) into multiple loci or into multiple genes, and integrating at the DSBs at least two different nucleotide sequences encoded by a polynucleotide (such as a double-stranded DNA, a single-stranded DNA, a single-stranded DNA/RNA hybrid, or a double-stranded DNA/RNA hybrid) donor molecule. In this non-limiting example, multiple genomic modifications (“multiplexed edits”) were effected in a maize cell by using multiple ribonucleoproteins (RNPs), each including a nuclease and a guide RNA (gRNA), to introduce a DSB at a predetermined site in the promoter region of each of two different maize genes involved in nitrogen uptake and utilization; a nitrate-responsive element sequence is then integrated at the site of the DSB in the first gene (AMT3), and a palindromic 12-nucleotide endogenous maize sequence having homology to the bacterial OCS enhancer is integrated at the site of the DSB in the second gene (Lc). In this example, a first round of editing to effect a first DSB and integration of a sequence encoded by a first polynucleotide donor molecule was carried out, followed by a second round of editing to effect a second DSB and integration of a sequence encoded by a second polynucleotide donor molecule; no selection or screening was performed between the editing rounds. The time between editing rounds was 3 hours or 18 hours.

[0415] Two crRNAs, a tracrRNA, and the polynucleotide donor molecules were purchased from Integrated DNA Technologies, Coralville, IA. The first crRNA (AMT3-Pro1) had the sequence of SEQ ID NO:346 (see Example 14) and the second crRNA (ZmLc-Pro3) had the sequence of SEQ ID NO:334 (see Example 9). The first polynucleotide donor molecule was a nitrogen responsive element (AtNRE, see Examples 9 and 13) encoded by a 43 base-pair chemically modified dsDNA having a first strand with the sequence of SEQ ID NO:349 annealed to a second strand with the sequence of SEQ ID NO:350, and the second polynucleotide donor molecule was the maize OCS homologue (see Example 8) encoded by a chemically modified single-stranded DNA with the sequence of SEQ ID NO:343. For both polynucleotide donor molecules, whether dsDNA or ssDNA, each strand was phosphorylated on the 5′ end and contained two phosphorothioate linkages at each terminus (i. e., the two linkages between the most distal three bases on either end of the strand). Individual guide RNA complexes were made by mixing 60 microliters of 100 micromolar tracrRNA and 60 microliters of the 100 micromolar crRNA (AMT3-Pro1 or ZmLc-Pro3), heating the mixture to 95 degrees Celsius for 5 minutes, removing from the heating block, and allowing the tubes to cool to room temperature on the benchtop. To prepare the donor polynucleotide molecules, 150 microliters (100 micromolar) of the first AtNRE strand (SEQ ID NO:349) and 150 microliters (100 micromolar) of the second AtNRE strand (SEQ ID NO:350) were mixed together in a tube; to another tube was added 150 microliters (100 micromolar) of the palindromic OCS homologue ssDNA (SEQ ID NO:343). The tubes were heated to 95 degrees Celsius for 5 minutes, then the heat was turned off and the solution allowed to slowly cool to room temperature in the block.

[0416] Maize B73 protoplasts were harvested from leaves of B73 maize plants that had been grown in nitrate-free medium for 13 days (see Examples 9, 13, and 14). The protoplasts underwent a first editing reaction to integrate a nitrogen-responsive element sequence in the promoter region of the AMT3 gene, and then underwent a second editing reaction to integrate an auxin-responsive element in the promoter region of the Lc gene. Maize protoplasts treated with no nuclease, no guide RNA complex, no salmon sperm DNA, and no polynucleotide donor molecule served as a null control. One milliliter of protoplasts (2×10\hat{ }5 cells per milliliter) was added to each of six reaction tubes. Then, to each of four tubes were added 5 microliters (50 micrograms) Cas9 nuclease (Aldevron, Fargo, ND) and 30 microliters of the AMT3-Pro1 guide RNA complex (AMT3-Pro1 crRNA/tracrRNA), and to the remaining two tubes (null controls) were added 90 microliters buffer. All tubes were incubated 5 minutes at room temperature. To each of the first four tubes (treated with the Cas9/AMT3-Pro1 guide RNA) were added 50 microliters of the AtNRE polynucleotide donor solution and 2 microliters (20 micrograms) salmon sperm DNA (VWR Cat. No.: 95037-160). To each tube was added 1.1 milliliters of 40% PEG; the reaction mixtures were mixed gently by tapping and incubated 5 minutes at room temperature. The reactions were stopped by adding 5 milliliters of washing buffer (0.6 molar mannitol, 4 millimolar MES pH 5.7, and 20 millimolar KCl) to each tube and mixed gently by inverting the tube. The tubes were centrifuged 2 minutes at 1200 rpm and the supernatant was then removed. The protoplasts were resuspended in 5 milliliters incubation solution (see Example 2, but without any nitrate and with 50 millimolar CaCl₂ added) and transferred to 10×10 cm dishes pre-coated with 5% calf serum; the dishes were sealed with Parafilm M® film (Bemis, Oshkosh, WI), incubated 30 minutes at 37 degrees Celsius, and then incubated at 26 degrees Celsius in the dark.

[0417] After 3 hours incubation at 26 degrees Celsius, two of the plates containing protoplasts treated with the Cas9/AMT3-Pro1 guide RNA and AtNRE polynucleotide donor molecule were subjected to the second editing reaction as follows. Ten microliters (100 micrograms) Cas9 and 60 microliters of the ZmLc-Pro3 guide RNA were mixed gently in a tube and incubated 5 minutes at room temperature; 50 microliters of the palindromic OCS homologue ssDNA (SEQ ID NO:343) solution and 2 microliters (20 micrograms) salmon sperm DNA (VWR Cat. No.: 95037-160) were then added and mixed gently in the tube. Two of the plates containing protoplasts treated with the Cas9/AMT3-Pro1 guide RNA and AtNRE polynucleotide donor molecule were harvested by centrifugation 2 minutes at 1200 rpm and the supernatant removed. The protoplasts from an individual plate were resuspended in two tubes each containing 1 milliliter washing buffer. Each tube received half of the prepared RNP (Cas9/ZmLc-Pro3)/OCS ssDNA/salmon sperm DNA mixture, and tapped gently to mix. To each tube was added 1.1 milliliters of 40% PEG; the reaction mixtures were mixed gently by tapping and incubated 5 minutes at room temperature. The reactions were stopped by adding 5 milliliters of washing buffer to each tube and mixed gently by inverting the tube. The tubes were centrifuged 2 minutes at 1200 rpm and the supernatant was then removed. The protoplasts were resuspended in 5 milliliters incubation solution (see Example 2, but without any nitrate and with 50 millimolar CaCl₂ added) and transferred to 10×10 cm dishes pre-coated with 5% calf serum; the dishes were sealed with Parafilm M® film (Bemis, Oshkosh, WI), incubated 30 minutes at 37 degrees Celsius, and then incubated at 26 degrees Celsius in the dark.

[0418] After 18 hours incubation at 26 degrees Celsius, the remaining two of the plates containing protoplasts treated with the Cas9/AMT3-Pro1 guide RNA and AtNRE polynucleotide donor molecule were subjected in a similar manner to the second editing reaction. All treatment steps were identical to those carried out at the 3-hour timepoint as described in the immediately preceding paragraph.

[0419] Twenty-four additional hours after the 18-hour transfection (editing reaction), half of the plates were treated with 0.5 millimolar KNO₃ and half with 0.5 millimolar KCl; cells were incubated 1 hour, and then harvested for analysis.

[0420] Quantitative RT-PCR was employed on three technical replicates per treatment to measure the relative expression of the AMT3 and Lc genes. Results (mean of triplicates, standard deviation) are provided in Table 15 and illustrated in FIG. 3, with relative gene expression levels normalized to tubulin. The data show that the endogenous (non-edited) AMT3 and Lc genes both show a moderate (about 4- to 5-fold, relative to KCl controls), nitrate-induced increase in expression. In the cells that underwent a second (ZmLc-Pro3/OCS homologue) transfection or editing reaction 3 hours after the first (AMT3-Pro1/AtNRE) transfection, there is a nitrate-induced increase in Lc expression that may be due to excess AtNRE polynucleotide donor, resulting in the AtNRE sequence being incorporated into the DSB effected by the later-provided Lc-Pro3 guide. In the cells that underwent a second (ZmLc-Pro3/OCS homologue) transfection or editing reaction 18 hours after the first (AMT3-Pro1/AtNRE) transfection, nitrate-induced increase is not observed in Lc expression, indicating that excess AtNRE polynucleotide has degraded and that it is the sequence encoded by the OCS homologue that is incorporated into the DSB effected by the Lc-Pro3 guide. There is increased relative expression of AMT3 even in the absence of nitrate induction, which suggests the possibility of some Cas9 remaining bound to the AMT3-Pro1 site at the time of the second (ZmLc-Pro3/OCS homologue) editing reaction, which might have resulted in unintentional incorporation of some OCS homologue sequence into the AMT3-Pro1 site; this effect is more evident at 3 hours than at 18 hours, indicating that there is less Cas9 remaining bound to the AMT3-Pro1 at 18 hours than at 3 hours. NGS sequencing is performed to verify and quantify correct integration of the polynucleotide donor molecules at the intended loci in the genome.

TABLE 15

| | | AMT3 | | Lc | |
|---|---|---|---|---|---|
| Genome editing | Nutrient | Relative | | Relative | |
| treatment | treatment | Expression | SD | Expression | SD |
| Null | KCl | 1.02 | 0.25 | 1.00 | 0.10 |
| | KNO₃ | 3.76 | 0.17 | 5.10 | 1.06 |
| AMT3-Pro1 + | KCl | 5.74 | 0.30 | 17.66 | 1.00 |
| AtRNE; at 3 | KNO₃ | 14.45 | 1.18 | 23.67 | 0.98 |
| hours Lc- | | | | | |
| Pro3 + OCS | | | | | |
| AMT3-Pro1 + | KCl | 3.37 | 0.06 | 20.34 | 1.51 |
| AtRNE; at 18 | KNO₃ | 15.22 | 1.97 | 20.04 | 0.51 |
| hours Lc- | | | | | |
| Pro3 + OCS | | | | | |

[0421] Similar genomic modification is carried out in maize whole plants or in maize plant tissues using procedures as described in Examples 31-34.

[0422] One of skill in the art would recognize that effecting multiple DSBs in a genome (e. g., effecting multiple DSBs in a sequence of interest or effecting at least one DSB in each of two or more sequences of interest) can be achieved by successive rounds of editing reactions in the same plant cell (or whole plant, plant part or tissue, embryo, or seed) in a manner such as that illustrated by this example. Any of these DSBs can be effected through alternative methods (e. g., use of CRISPR nucleases other than Cas9, such as a Cpf1 (Cas12a) nuclease, a CasY (Cas12d) nuclease, a CasX (Cas12e) nuclease, a C2c1 nuclease, a C2c3 nuclease, a Cas12f nuclease, a Cas12i nuclease, a Cas12j nuclease, zinc-finger nucleases (ZFNs), transcription activator-like effector nucleases (TAL-effector nucleases or TALENs), Argonaute proteins, or a meganuclease or engineered meganuclease) and thus similar embodiments of the approach described herein include use of any of these methods and effector molecules for simultaneously effecting multiple DSBs in a genome, and, optionally, integrating at least one polynucleotide molecule at one or more DSBs.

### Example 17

[0423] This example illustrates a method of modifying a sequence of interest in a genome, comprising integrating a polynucleotide (such as a double-stranded DNA, a single-stranded DNA, a single-stranded DNA/RNA hybrid, or a double-stranded DNA/RNA hybrid) molecule at the site of at least one double-strand break (DSB) in a genome. More specifically, this example illustrates integrating a sequence encoded by a polynucleotide into one or more double-strand breaks in a genome, wherein at least one of the DSBs is asymmetric (e. g., has at least a one-nucleotide overhang), and wherein the sequence encoded by the polynucleotide is integrated at the asymmetric DSB in a specific orientation. This approach is useful for integrating a specifically oriented recombinase recognition site sequence at each of two DSBs effected in a genome, allowing use of a sequence-specific recombinase to mediate deletion, exchange, inversion, or translocation of genomic sequence flanked by the recombinase recognition sites thus integrated.

[0424] In this example, the nuclease Cpf1 is used to effect a DSB containing overhangs at two loci in a genome, for example, in each of the two introns flanking an exon. A first recombinase recognition site sequence is integrated into one DSB and a second recombinase recognition site sequence is integrated into the other DSB; the two recombinase recognition site sequences are heterospecific relative to each other, i. e., each will not recombine together but each will recombine only with another recombination site of its own type. Subsequent to the genomic integration of the heterospecific recombinase recognition site sequences, a polynucleotide donor molecule is provided for recombinase-mediated genomic sequence replacement, for example, replacement of an exon. This polynucleotide donor molecule includes a replacement genomic sequence (for example, a replacement exon sequence) and further includes on each terminus a recombinase recognition site sequence that is homospecific to (i. e., will recombine with) one of the genomically integrated recombinase recognition site sequences. The appropriate recombinase is also provided, resulting in the exchange of the endogenous exon sequence for the replacement exon sequence. This technique avoids introducing editing inaccuracies such as unintentional nucleotide changes, deletions, or additions in the integrated replacement exon sequence or the messenger RNA encoded by the replacement exon. In the particular example described below, this technique is used to replace a “wild-type” maize EPSPS exon 2 (an exon having unmodified, native genomic sequence) with a replacement exon 2 sequence that encodes a modified EPSPS protein having resistance to glyphosate.

[0425] The target gene selected for editing is the maize (Zea mays, B73 line) enolpyruvylshikimate phosphate synthase1 (EPSPS) gene (see www[dot]maizegdb[dot]org/gene_center/gene/Zm00001d045450) with the partial genomic sequence of gtgaacaaccttatgaaatttgggcgcaaagaactcgccctcaagggttgatcttatgccatcgtcatgataaacagtggagcacggacgatcctttacgtt gtttttaacaaaetttgtcagaaaactagcatcattaaettettaatgacgatttcacaacaaaaaaaggtaacctcgctactaacataacaaaatacttgttgc ttattaattatatgttttttaatctttgatcAGGGGACAACAGTGGTTGATAACCTGTTGAACAGTGAGGATGTCC ACTACATGCTCGGGGCCTTGAGGACTCTTGGTCTCTCTGTCGAAGCGGACAAAGCTGCCAAA AGAGCTGTAGTTGTTGGCTGTGGTGGAAAGTTCCCAGTTGAGGATTCTAAAGAGGAAGTGC AGCTCTTCTTGGGGAATGCTGGAACTGCAATGCGGCCATTGACAGCAGCTGTTACTGCTGCT GGTGGAAATGCAACgtatgtttcctctctttctctctacaatacttgctggagttagtatgaaacccatgggtatgtctagt (SEQ ID NO:367); a first intronic sequence (nucleotides 1-238 of SEQ ID NO:367) and a second intronic sequence (nucleotides 483-550 of SEQ ID NO:367) are given in lower-case font, exonic sequence (nucleotides 239-482 of SEQ ID NO:367) is given in upper-case font, a first crRNA (guide RNA) target site sequence (nucleotides 23-43 of SEQ ID NO:367) and a second crRNA (guide RNA) target site sequence (nucleotides 508-528 of SEQ ID NO:367) are italicized and the PAM sites (nucleotides 19-22 and nucleotides 529-532 of SEQ ID NO:367) are underlined.

[0426] Maize B73 protoplasts are prepared as described in Examples 1, 3, 4, 5, 6, 9, 10, and 11. Ribonucleoproteins (RNPs) are prepared with Cpf1 nuclease (Aldevron, Fargo, ND) and either of two guide RNAs (purchased from Integrated DNA Technologies, Coralville, IA); the first guide RNA (“EPS-Cpf1-g1”) has the sequence UAAUUUCUACUCUUGUAGAUGGCGCAAAGAACUCGCCCUCA (SEQ ID NO:368) and the second guide RNA (“EPS-Cpf1-g2”) has the sequence UAAUUUCUACUCUUGUAGAUAUACUAACUCCAGCAAGUAUU (SEQ ID NO:369).

[0427] Two different, chemically modified, double-stranded DNA (dsDNA) donor molecules, each encoding one of a pair of heterospecific recombinase recognition site sequences (in this case, loxP and lox2272), are used in this experiment. The first dsDNA (“loxP”) donor molecule, containing 40 base pairs and 5-nucleotide overhangs, is produced by annealing a first strand having the sequence

(SEQ ID NO: 370)
5′-P-
T*C*AAGGGT
ATAACTTCGTATAGCATACATTATACGAAGTTATTCA-3′

and a second strand having the sequence

(SEQ ID NO: 371)
5′-P-
C*T*TGATGA
ATAACTTCGTATAATGTATGCTATACGAAGTTATACC-3′;

the loxP sequences are underlined. The second dsDNA (“lox2272”) donor molecule, containing 40 base pairs and 5-nucleotide overhangs, is produced by annealing a first strand having the sequence

(SEQ ID NO: 372)
5′-P-
A*C*AATGGT
ATAACTTCGTATAAAGTATCCTATACGAAGTTATTCA-3′

and a second strand having the sequence

(SEQ ID NO: 373)
5′-P-
A*T*TGTTGA
ATAACTTCGTATAGgATACtTTATACGAAGTTATACC-3′;

the lox2272 sequences are underlined.

[0428] This polynucleotide molecule including a replacement genomic sequence (for example, a replacement exon sequence) and further includes on each terminus a recombinase recognition site sequence that is homospecific to (i. e., will recombine with) one of the genomically integrated recombinase recognition site sequences.

[0429] A dsDNA molecule, including a replacement EPSPS exon sequence and further including a loxP recombinase recognition sequence 5′ to the EPSPS exon sequence and a lox2272 recombinase recognition sequence 3′ to the EPSPS exon sequence, was prepared by PCR using primers and a template purchased from Integrated DNA Technologies, Coralville, IA. The primers were had the sequences 5′-P-G*T*GAACAACCTTATGAAATTTGGG (forward primer, SEQ ID NO:374) and 5′-P-A*C*TAGACATACCCATGGGTTTCAT (reverse primer, SEQ ID NO:375), where P represents a 5′ phosphorylation and * indicates a phosphorothioate linkage. The template sequence is given by

(SEQ ID NO: 376)
5′-
GTGAACAACCTTATGAAATTTGGGCGCATAA
CTTCGTATAGCATACATTATACGAAGTTATA
AAGAACTCGCCCTCAAGGGTTGATCTTATGC
CATCGTCATGATAAACAGTGGAGCACGGACG
ATCCTTTACGTTGTTTTTAACAAACTTTGTC
AGAAAACTAGCATCATTAACTTCTTAATGAC
GATTTCACAACAAAAAAAGGTAACCTCGCTA
CTAACATAACAAAATACTTGTTGCTTATTAA
TTATATGTTTTTTAATCTTTGATCAGGGGAC
AACAGTGGTTGATAACCTGTTGAACAGTGAG
GATGTCCACTACATGCTCGGGGCCTTGAGGA
CTCTTGGTCTCTCTGTCGAAGCGGACAAAGC
TGCCAAAAGAGCTGTAGTTGTTGGCTGTGGT
GGAAAGTTCCCAGTTGAGGATTCTAAAGAGG
AAGTGCAGCTCTTCTTGGGGAATGCTGGAAT
TGCAATGCGGGCATTGACAGCAGCTGTTACT
GCTGCTGGTGGAAATGCAACGTATGTTTCCT
CTCTTTCTCTCTACAATACTTGCATAACTTC
GTATAAAGTATCCTATACGAAGTTATTGGAG
TTAGTATGAAACCCATGGGTATGTCTAGT-3′;

this contains a loxP recombinase site sequence at positions 28-61 (underlined) of SEQ ID NO:376 and a lox2272 recombinase site sequence at positions 551-584 (underlined) of SEQ ID NO:376, and further contains nucleotide changes (relative to the wild-type sequence) at positions 465 and 476 of SEQ ID NO:376 to provide the amino acid mutations T1021 and P106A in the mature protein, which are point mutations found in glyphosate-resistant EPSPS; see also Example 7.

[0430] A plant-codon-optimized Cre recombinase sequence was synthesized (Integrated DNA Technologies, Coralville, IA). The Cre recombinase sequence was cloned into a vector including a heat shock-inducible promoter for driving the expression of Cre. Alternatively, Cre protein is delivered directly into the cells. A Cre fusion protein useful for this recombinase reaction is a recombinant cell-permeant fusion including Cre-recombinase and a TAT sequence (a nuclear localization sequence, NLS); see, e. g., Millipore Sigma catalogue number SCR508 (EMD Millipore Corporation, Billerica, MA).

[0431] The maize protoplasts were subjected to a first editing reaction to integrate a loxP recombinase site sequence in the first intronic region of the EPSPS sequence given by SEQ ID NO:367, followed by a second editing reaction to integrate a lox2272 recombinase site sequence in the first intronic region of the EPSPS sequence given by SEQ ID NO:367. Maize protoplasts treated with no nuclease, no guide RNA complex, no salmon sperm DNA, and no polynucleotide donor molecule served as a null control. The multiplexed editing steps were carried out essentially as described in Example 16, with the second editing reaction carried out 18 hours after the first editing reaction; each editing reaction was followed with an initial incubation at 37 degrees Celsius (30 minutes) and then with an extended incubation room temperature (7 hours to overnight). In a final step, the protoplasts were subjected to a Cre recombinase-mediated recombination reaction in which a replacement EPSPS exon sequence replaced the endogenous EPSPS exon sequence, guided by the respective pairing of the homospecific loxP and homospecific lox2272 recombinase recognition site sequence pairs. The protoplasts were subjected to PEG-mediated transfection with the dsDNA molecule including a replacement EPSPS exon sequence (provided, e.g., as a circular plasmid or as linearized dsDNA) and with the plant-codon-optimized Cre recombinase provided as the recombinase protein (alternatively, this can be provided via an expression vector, although initial experiments indicated greater efficiency when the recombinase was provided as the protein). The Cre-treated protoplasts were transferred to plates pre-coated with 5% calf serum and containing YPIM B-liquid medium containing 50 millimolar calcium chloride, and incubated at 26 degrees Celsius. Seventy-two additional hours after the Cre-mediated recombination reaction, cells were harvested for analysis and the genomic DNA subjected to two-step PCR amplification; editing events were analyzed by Amplicon-seq, using an EC2 forward primer with the sequence AGCACGGACGATCCTTTACG (SEQ ID NO:1021) and an EC2 reverse primer with the sequence AGCTGCTTCAATCCGACAACC (SEQ ID NO:1022) to amplify the region AGCACGGACGATCCTTTACGTTGTTTTTAACAAACTTTGTCAGAAAACTAGCATCATTAACT TCTTAATGACGATTTCACAACAAAAAAAGGTAACCTCGCTACTAACATAACAAAATACTTGT TGCTTATTAATTATATGTTTTTTAATCTTTGATCAGGGGACAACAGTGGTTGATAACCTGTTG AACAGTGAGGATGTCCACTACATGCTCGGGGCCTTGAGGACTCTTGGTCTCTCTGTCGAAGC GGACAAAGCTGCCAAAAGAGCTGTAGTTGTTGGCTGTGGTGGAAAGTTCCCAGTTGAGGAT TCTAAAGAGGAAGTGCAGCTCTTCTTGGGGAATGCTGGAACTGCAATGCGGCCATTGACAG CAGCTGTTACTGCTGCTGGTGGAAATGCAACGTATGTTTCCTCTCTTTCTCTCTACAATACTT GCTGGAGTTAGTATGAAACCCATGGGTATGTCTAGTGGCTTATGGTGTATTGGTTTTTGAAC TTCAGTTACGTGCTTGATGGAGTACCAAGAATGAGGGAGAGACCCATTGGCGACTTGGTTGT CGGATTGAAGCAGCT (SEQ ID NO:1023). Amplicon-seq results were analyzed by CrispRVariants (publicly available at bioconductor[dot]org/packages/release/bioc/html/CrispRVariants[dot]html). The results showed that 2.77% of the total reads contained the expected nucleotide sequence changes (i.e., nucleotide changes relative to the wild-type sequence at positions 465 and 476 of SEQ ID NO:376). Thus, in this experiment, a replacement EPSPS exon sequence encoding the amino acid mutations T1021 and P106A (as found in the mature glyphosate-resistant EPSPS protein) correctly replaced the endogenous EPSPS exon sequence in almost 3% of the maize cells.

[0432] Similar genomic modification is carried out in maize whole plants or in maize plant tissues using procedures as described in Examples 31-34.

[0433] One of skill in the art would recognize that there are many other possible applications of this approach, which combines (a) integrating at least one recombinase recognition site sequence encoded by a polynucleotide donor molecule at one or more DSBs effected by a sequence-specific nuclease, and (b) treatment with a recombinase, and optionally with a polynucleotide molecule that includes at least one recombinase recognition site sequence. Various combinations of homospecific and heterospecific recombinase recognition sites and recombinases can be used. The genomic outcome of such applications include recombinase-mediated deletion, exchange, inversion, or translocation of genomic sequence. Any of these approaches can be combined with other editing techniques. For example, the edited herbicide-tolerant EPSPS enzyme provided by the methods described in this Example can be combined with integration at a DSB effected in the 3′ untranslated region of the edited herbicide-tolerant EPSPS gene of at least one recognition site sequence for an siRNA or a miRNA specifically expressed in male reproductive tissue or female reproductive tissue (e. g., the miRNAs disclosed in Table 6 of U.S. Pat. No. 8,334,430 or the siRNAs disclosed in U.S. Pat. No. 9,139,838, both incorporated herein by reference); this results in expression of the edited herbicide-tolerant enzyme being restricted to tissues other than those in which the siRNA or miRNA is endogenously expressed, and those tissues in which the siRNA or miRNA is expressed will not be resistant to herbicide application; this approach is useful, e. g., to provide male-sterile or female-sterile plants. Although the details provided here are specific to Cre recombinase and loxP (and lox variant) sites, the methods and compositions described herein are generally applicable to other recombinases and their corresponding recombinase recognition site sequences, such as, but not limited to, FLP recombinase and frt recombinase recognition site sequences, R recombinase and Rs recombinase recognition site sequences, Dre recombinase and rox recombinase recognition site sequences, and Gin recombinase and gix recombinase recognition site sequences.

### Example 18

[0434] This example describes the modification of three genes in a maize plant cell to provide increased nitrogen use efficiency (NUE).

[0435] Maize protoplasts are prepared as described in Example 1. Preparation of reagents, gene editing procedures, and detection of gene modifications are carried out using procedures similar to those described in Examples 13-16.

[0436] An increase in expression of NRT2.2 (Zm00001d054060) is predicted to increase nitrogen use efficiency. A partial genomic sequence of NRT2.2 is provided as SEQ ID NO:381. A nitrogen responsive element sequence encoded by a polynucleotide (such as a double-stranded DNA, a single-stranded DNA, a single-stranded DNA/RNA hybrid, or a double-stranded DNA/RNA hybrid) is inserted upstream of the transcription start site (TSS) of the NRT2.2 coding region at a double-strand break effected between nucleotides at positions 101/102 of SEQ ID NO:381 in order to enhance the expression of NRT2.2. The nitrogen responsive element (AtNRE, see Examples 9, 13, and 16) is encoded by a 43 base-pair chemically modified dsDNA (Integrated DNA Technologies, Coralville, IA) having a first strand with the sequence of SEQ ID NO:349 annealed to a second strand with the sequence of SEQ ID NO:350; each strand was phosphorylated on the 5′ end and contained two phosphorothioate linkages at each terminus (i. e., the two linkages between the most distal three bases on either end of the strand). A NRT2.2 crRNA with the sequence of SEQ ID NO:397 is designed to target the nucleotides shown in bold italic in SEQ ID NO:381 (Table 16); the crRNA and tracrRNA are purchased from Integrated DNA Technologies, Coralville, IA. Ribonucleoprotein (RNP) complexes are prepared using gRNA (crRNA:tracrRNA) and Cas9 nuclease (Aldevron, Fargo, ND). Integration of the NRE sequence into the NRT2.2 gene is carried out using procedures similar to those described in Examples 13-16.

[0437] An increase in expression of NRT2.2 and GLN1.4 (Zm00001d051804) simultaneously is predicted to further increase nitrogen use efficiency. A partial genomic sequence of GLN1.4 is provided as SEQ ID NO:382. A nitrogen responsive element sequence encoded by a polynucleotide (such as a double-stranded DNA, a single-stranded DNA, a single-stranded DNA/RNA hybrid, or a double-stranded DNA/RNA hybrid) donor molecule is inserted upstream of the transcription start site (TSS) of the GLN1.4 coding region at a double-strand break effected between nucleotides at positions 115/116 of SEQ ID NO:382 in order to enhance the expression of GLN1.4. The NRE is provided as a 43 base-pair chemically modified dsDNA (Integrated DNA Technologies, Coralville, IA) having a first strand with the sequence of SEQ ID NO:349 annealed to a second strand with the sequence of SEQ ID NO:350; each strand was phosphorylated on the 5′ end and contained two phosphorothioate linkages at each terminus (i. e., the two linkages between the most distal three bases on either end of the strand). A GLN1.4 crRNA with the sequence of SEQ ID NO:398 is designed to target the nucleotide shown in bold italic in SEQ ID NO:382 (Table 16); the crRNA and tracrRNA are purchased from Integrated DNA Technologies, Coralville, IA. Ribonucleoprotein (RNP) complexes are prepared using gRNA (crRNA:tracrRNA) and Cas9 nuclease (Aldevron, Fargo, ND). Integration of the NRE sequence into the GLN1.4 gene is carried out using procedures similar to those described in Examples 13-16.

[0438] An increase in expression of NRT2.2, GLN1.4, and Dof1 (Zm00001d031278) simultaneously is predicted to even further increase nitrogen use efficiency. A partial genomic sequence of Dof1 is provided as SEQ ID NO:383. Constitutive overexpression of Dof1 has been shown to result in increased photosynthesis under low nitrate conditions in rice (DOI: 10.1111/j.1467-7652.2011.00592.x). In this embodiment the expression of Dof1 is modified to be constitutively expressed by inserting a constitutive enhancer sequence. A maize OCS homologue (see Examples 8 and 16) encoded by a chemically modified single-stranded DNA with the sequence of SEQ ID NO:343 (Integrated DNA Technologies, Coralville, IA), phosphorylated on the 5′ end and containing two phosphorothioate linkages at each terminus (i. e., the two linkages between the most distal three bases on either end of the strand), is designed for insertion upstream of the transcription start site (TSS) of the Dof1 coding region at a double-strand break effected between nucleotides at positions 101/102 of SEQ ID NO:383 in order to enhance the expression of Dof1. A Dof1 crRNA with the sequence of SEQ ID NO:399 is designed to target the nucleotides shown in bold italic in SEQ ID NO:383 (Table 16); crRNA and tracrRNA are purchased from Integrated DNA Technologies, Coralville, IA. Ribonucleoprotein (RNP) complexes are prepared using gRNA (crRNA:tracrRNA) and Cas9 nuclease (Aldevron, Fargo, ND). Integration of the maize OCS homologue sequence into the Dof1 gene is carried out using procedures similar to those described in Examples 13-16.

[0439] Similar genomic modification is carried out in maize whole plants or in maize plant tissues using procedures as described in Examples 31-34.

### Example 19

[0440] This example describes the modification of four genes in a maize plant cell to provide increased NUE and to create higher yield through increased kernel number. In this example the proxy assay for increased kernel number is increased expression of the gene Wuschel, which has been shown to be connected to kernel row number (see, e. g., doi:10.1038/ng.3567).

[0441] Maize protoplasts are prepared as described in Example 1. Preparation of reagents, gene editing procedures, and detection of gene modifications are carried out using procedures similar to those described in Examples 13-16.

[0442] An increase in expression of NRT2.2 (Zm00001d054060) is predicted to increase nitrogen use efficiency. A partial genomic sequence of NRT2.2 is provided as SEQ ID NO:381. A nitrogen responsive element sequence encoded by a polynucleotide (such as a double-stranded DNA, a single-stranded DNA, a single-stranded DNA/RNA hybrid, or a double-stranded DNA/RNA hybrid) is inserted at a double-strand break effected between nucleotides at positions 101/102 of SEQ ID NO:381 in order to enhance the expression of NRT2.2. The nitrogen responsive element (AtNRE, see Examples 9, 13, and 16) is encoded by a 43 base-pair chemically modified dsDNA (Integrated DNA Technologies, Coralville, IA) having a first strand with the sequence of SEQ ID NO:349 annealed to a second strand with the sequence of SEQ ID NO:350; each strand was phosphorylated on the 5′ end and contained two phosphorothioate linkages at each terminus (i. e., the two linkages between the most distal three bases on either end of the strand). A NRT2.2 crRNA with the sequence of SEQ ID NO:397 is designed to target the nucleotides shown in bold italic in SEQ ID NO:381 (Table 16); the crRNA and tracrRNA are purchased from Integrated DNA Technologies, Coralville, IA. Ribonucleoprotein (RNP) complexes are prepared using gRNA (crRNA:tracrRNA) and Cas9 nuclease (Aldevron, Fargo, ND). Integration of the NRE sequence into the NRT2.2 gene is carried out using procedures similar to those described in Examples 13-16.

[0443] An increase in expression of NRT2.2 and GLN1.4 (Zm00001d051804) simultaneously is predicted to further increase nitrogen use efficiency. A partial genomic sequence of GLN1.4 is provided as SEQ ID NO:382. A nitrogen responsive element sequence encoded by a polynucleotide (such as a double-stranded DNA, a single-stranded DNA, a single-stranded DNA/RNA hybrid, or a double-stranded DNA/RNA hybrid) donor molecule is inserted at a double-strand break effected between nucleotides at positions 115/116 of SEQ ID NO:382 in order to enhance the expression of GLN1.4. The NRE is provided as a 43 base-pair chemically modified dsDNA (Integrated DNA Technologies, Coralville, IA) having a first strand with the sequence of SEQ ID NO:349 annealed to a second strand with the sequence of SEQ ID NO:350; each strand was phosphorylated on the 5′ end and contained two phosphorothioate linkages at each terminus (i. e., the two linkages between the most distal three bases on either end of the strand). A GLN1.4 crRNA with the sequence of SEQ ID NO:398 is designed to target the nucleotide shown in bold italic in SEQ ID NO:382 (Table 16); the crRNA and tracrRNA are purchased from Integrated DNA Technologies, Coralville, IA. Ribonucleoprotein (RNP) complexes are prepared using gRNA (crRNA:tracrRNA) and Cas9 nuclease (Aldevron, Fargo, ND). Integration of the NRE sequence into the GLN1.4 gene is carried out using procedures similar to those described in Examples 13-16.

[0444] An increase in expression of NRT2.2, GLN1.4, and Dof1 (Zm00001d031278) simultaneously is predicted to even further increase nitrogen use efficiency. A partial genomic sequence of Dof1 is provided as SEQ ID NO:383. Constitutive overexpression of Dof1 has been shown to result in increased photosynthesis under low nitrate conditions in rice (see, e. g., DOI: 10.1111/j.1467-7652.2011.00592.x). In this embodiment the expression of Dof1 is modified to be constitutively expressed by inserting a constitutive enhancer sequence. A maize OCS homologue (see Examples 8 and 16) encoded by a chemically modified single-stranded DNA with the sequence of SEQ ID NO:343 (Integrated DNA Technologies, Coralville, IA), phosphorylated on the 5′ end and containing two phosphorothioate linkages at each terminus (i. e., the two linkages between the most distal three bases on either end of the strand), is designed for insertion at a double-strand break effected between nucleotides at positions 101/102 of SEQ ID NO:383 in order to enhance the expression of Dof1. A Dof1 crRNA with the sequence of SEQ ID NO:399 is designed to target the nucleotides shown in bold italic in SEQ ID NO:383 (Table 16); crRNA and tracrRNA are purchased from Integrated DNA Technologies, Coralville, IA. Ribonucleoprotein (RNP) complexes are prepared using gRNA (crRNA:tracrRNA) and Cas9 nuclease (Aldevron, Fargo, ND). Integration of the maize OCS homologue sequence into the Dof1 gene is carried out using procedures similar to those described in Examples 13-16.

[0445] An increase in expression of NRT2.2, GLN1.4, and Dof1 and a decrease in expression of FEA3 (Zm00001d040130), a putative Leucine Rich Repeat (LRR) Receptor-like protein, is predicted to provide an increase in the expression of Wuschel and other meristem-promoting genes, resulting in an overall increase in meristem size and ultimately in increased yield (see, e. g., doi:10.1038/ng.3567). A partial genomic sequence of FEA3 including 3′ untranslated region (3′ UTR) is provided as SEQ ID NO:386.

[0446] An mRNA destabilizing element oligonucleotide having the sequence TTATTTATTTTATTTATTTTATTTATTTTATTTATT (SEQ ID NO:378) and encoded by a polynucleotide (such as a double-stranded DNA, a single-stranded DNA, a single-stranded DNA/RNA hybrid, or a double-stranded DNA/RNA hybrid) donor molecule is designed for insertion in the 3′ UTR of FEA3 at a double-strand break effected between nucleotides at positions 25/26, 143/144, or 263/264 of SEQ ID NO:386 (see Table 16) in order to reduce the expression of FEA3 gene. The nucleotides targeted by each of the three different FEA3 crRNAs are shown in bold italic in SEQ ID NO:386 in Table 16; the crRNA sequences are provided as SEQ ID NOs:402, 403, 404 (see Table 17). All crRNAs and tracrRNA are purchased from Integrated DNA Technologies, Coralville, IA. Ribonucleoprotein (RNP) complexes are prepared using guide RNAs (crRNA:tracrRNA) and Cas9 nuclease (Aldevron, Fargo, ND). Insertion of the mRNA destabilizing element into the 3′ untranslated region of the FEA3 gene is carried out using procedures similar to those described in Examples 13-16.

[0447] Similar genomic modification is carried out in maize whole plants or in maize plant tissues using procedures as described in Examples 31-34.

### Example 20

[0448] This example illustrates a method of providing a plant cell having a modified phenotype, the method including introducing double-strand breaks (DSBs) into multiple loci or into multiple genes, and integrating at the DSBs at least three different nucleotide sequences encoded by a polynucleotide (such as a double-stranded DNA, a single-stranded DNA, a single-stranded DNA/RNA hybrid, or a double-stranded DNA/RNA hybrid) donor molecule, and generating loss-of-function alleles by deletion of genome sequences between at least two DSBs. In this non-limiting example, multiple genomic modifications (“multiplexed edits”) are effected in a maize cell by using multiple ribonucleoproteins (RNPs), each including a nuclease and a guide RNA (gRNA) and three different nucleotide sequences.

[0449] This example describes the modification of six genes in maize protoplast cells to provide increased nitrogen use efficiency, increased kernel number, elevated glyphosate tolerance in the plant cell, and broad spectrum disease resistance.

[0450] Maize protoplasts are prepared as described in Example 1. Preparation of reagents, gene editing procedures, and detection of gene modifications are carried out using procedures similar to those described in Examples 13-16.

[0451] An increase in expression of NRT2.2 (Zm00001d054060) is predicted to increase nitrogen use efficiency. A partial genomic sequence of NRT2.2 is provided as SEQ ID NO:381. A nitrogen responsive element sequence encoded by a polynucleotide (such as a double-stranded DNA, a single-stranded DNA, a single-stranded DNA/RNA hybrid, or a double-stranded DNA/RNA hybrid) is inserted at a double-strand break effected between nucleotides at positions 101/102 of SEQ ID NO:381 in order to enhance the expression of NRT2.2. The nitrogen responsive element (AtNRE, see Examples 9, 13, and 16) is encoded by a 43 base-pair chemically modified dsDNA (Integrated DNA Technologies, Coralville, IA) having a first strand with the sequence of SEQ ID NO:349 annealed to a second strand with the sequence of SEQ ID NO:350; each strand was phosphorylated on the 5′ end and contained two phosphorothioate linkages at each terminus (i. e., the two linkages between the most distal three bases on either end of the strand). A NRT2.2 crRNA with the sequence of SEQ ID NO:397 is designed to target the nucleotides shown in bold italic in SEQ ID NO:381 (Table 16); the crRNA and tracrRNA are purchased from Integrated DNA Technologies, Coralville, IA. Ribonucleoprotein (RNP) complexes are prepared using gRNA (crRNA:tracrRNA) and Cas9 nuclease (Aldevron, Fargo, ND). Integration of the NRE sequence into the NRT2.2 gene is carried out using procedures similar to those described in Examples 13-16.

[0452] An increase in expression of NRT2.2 and GLN1.4 (Zm00001d051804) simultaneously is predicted to further increase nitrogen use efficiency. A partial genomic sequence of GLN1.4 is provided as SEQ ID NO:382. A nitrogen responsive element sequence encoded by a polynucleotide (such as a double-stranded DNA, a single-stranded DNA, a single-stranded DNA/RNA hybrid, or a double-stranded DNA/RNA hybrid) donor molecule is inserted at a double-strand break effected between nucleotides at positions 115/116 of SEQ ID NO:382 in order to enhance the expression of GLN1.4. The NRE is provided as a 43 base-pair chemically modified dsDNA (Integrated DNA Technologies, Coralville, IA) having a first strand with the sequence of SEQ ID NO:349 annealed to a second strand with the sequence of SEQ ID NO:350; each strand was phosphorylated on the 5′ end and contained two phosphorothioate linkages at each terminus (i. e., the two linkages between the most distal three bases on either end of the strand). A GLN1.4 crRNA with the sequence of SEQ ID NO:398 is designed to target the nucleotide shown in bold italic in SEQ ID NO:382 (Table 16); the crRNA and tracrRNA are purchased from Integrated DNA Technologies, Coralville, IA. Ribonucleoprotein (RNP) complexes are prepared using gRNA (crRNA:tracrRNA) and Cas9 nuclease (Aldevron, Fargo, ND). Integration of the NRE sequence into the GLN1.4 gene is carried out using procedures similar to those described in Examples 13-16.

[0453] An increase in expression of NRT2.2, GLN1.4, and Dof1 (Zm00001d031278) simultaneously is predicted to even further increase nitrogen use efficiency. A partial genomic sequence of Dof1 is provided as SEQ ID NO:383. Constitutive overexpression of Dof1 has been shown to result in increased photosynthesis under low nitrate conditions in rice (see, e. g., DOI: 10.1111/j.1467-7652.2011.00592.x). In this embodiment the expression of Dof1 is modified to be constitutively expressed by inserting a constitutive enhancer sequence. A maize OCS homologue (see Examples 8 and 16) encoded by a chemically modified single-stranded DNA with the sequence of SEQ ID NO:343 (Integrated DNA Technologies, Coralville, IA), phosphorylated on the 5′ end and containing two phosphorothioate linkages at each terminus (i. e., the two linkages between the most distal three bases on either end of the strand) is designed for insertion at a double-strand break effected between nucleotides at positions 101/102 of SEQ ID NO:383 in order to enhance the expression of Dof1. A Dof1 crRNA with sequence of SEQ ID NO:399 is designed to target the nucleotides shown in bold italic in SEQ ID NO:383 (Table 16); crRNA and tracrRNA are purchased from Integrated DNA Technologies, Coralville, IA. Ribonucleoprotein (RNP) complexes are prepared using gRNA (crRNA:tracrRNA) and Cas9 nuclease (Aldevron, Fargo, ND). Integration of the maize OCS homologue sequence into the Dof1 gene is carried out using procedures similar to those described in Examples 13-16.

[0454] An increase in expression of NRT2.2, GLN1.4, and Dof1 and a loss of function allele of FEA3 (Zm00001d040130), a putative Leucine Rich Repeat (LRR) Receptor-like protein, is expected to provide an increase in the expression of Wuschel and other meristem-promoting genes, resulting in an overall increase in meristem size and ultimately in increased kernel row numbers (see, e. g., doi:10.1038/ng.3567). A partial genomic sequence of FEA3 is provided as SEQ ID NO:387. Two ribonucleoproteins (RNPs), each including a nuclease and a guide RNA (gRNA) are designed to effect double-strand breaks between nucleotides at positions 115/116 and 207/208 of SEQ ID NO:387 (see Table 16), resulting in deletion of genomic sequence of FEA3 gene between the two guide targeting regions and effectively knocking out expression of a functional FEA3 protein. The nucleotides targeted by each of the two FEA3 crRNAs are shown in bold italic in SEQ ID NO:387 in Table 16; the crRNA sequences are provided as SEQ ID NOs:405 and 406 (see Table 17). All crRNAs and tracrRNA are purchased from Integrated DNA Technologies, Coralville, IA. Ribonucleoprotein (RNP) complexes are prepared using guide RNAs (crRNA:tracrRNA) and Cas9 nuclease (Aldevron, Fargo, ND). Functional knock-out by partial sequence deletion of the FEA3 gene is carried out using procedures similar to those described in Examples 13-16.

[0455] An increase in the expression of the maize enolpyruvylshikimate phosphate synthase 1 (EPSPS, Zm00001d045450) is predicted to be required in order to deliver a plant with commercial-level glyphosate tolerance with no growth or performance drag. A partial genomic sequence of EPSPS is provided as SEQ ID NO:384. In this embodiment, the expression of the endogenous EPSPS is modified to be constitutively expressed by inserting a constitutive enhancer sequence. A maize OCS homologue (see Examples 14 and 23) encoded by a chemically modified single-stranded DNA with the sequence of SEQ ID NO:343 (Integrated DNA Technologies, Coralville, IA), phosphorylated on the 5′ end and containing two phosphorothioate linkages at each terminus (i. e., the two linkages between the most distal three bases on either end of the strand) is designed for insertion at a double-strand break effected between nucleotides at positions 101/102 of SEQ ID NO:384 in order to provide constitutively increased expression of EPSPS. An EPSPS crRNA with sequence of SEQ ID NO:400 is designed to target the nucleotides shown in bold italic in SEQ ID NO:384 (Table 16); crRNA and tracrRNA are purchased from Integrated DNA Technologies, Coralville, IA. Ribonucleoprotein (RNP) complexes are prepared using gRNA (crRNA:tracrRNA) and Cas9 nuclease (Aldevron, Fargo, ND). Integration of the maize OCS homologue sequence into the EPSPS gene is carried out using procedures similar to those described in Examples 13-16.

[0456] An increase in the expression of NPR1 (Zm00001d012660) is predicted to increase disease resistance (see, e. g., doi: 10.1094/MPMI-21-9-1215). However, constitutive overexpression results in a significant fitness cost (see, e. g., doi.org/10.1016/j.plantsci.2016.06.005). It is predicted that this undesirable fitness drag will be mitigated by modifying the endogenous NPR1 gene by inserting an upstream ORF (uORF) into the 5′UTR, which will reduce the translation efficiency of the target gene (and hence the fitness drag) in the absence of a pathogen. A partial sequence of NPR1 is provided as SEQ ID NO:385. A uORF sequence encoded by a chemically modified single-stranded DNA with the sequence of SEQ ID NO:379, phosphorylated on the 5′ end and containing two phosphorothioate linkages at each terminus (i. e., the two linkages between the most distal three bases on either end of the strand), is designed for insertion at a double-strand break effected between nucleotides at positions 101/102 of SEQ ID NO:385 (see Table 16) in order to modulate the expression of NPR1. The nucleotides targeted by the NPR1 crRNA are shown in bold italic in Table 16. The crRNA sequence is provided as SEQ ID NO:401 (see Table 17). All crRNA and tracrRNA are purchased from Integrated DNA Technologies, Coralville, IA. Ribonucleoprotein (RNP) complexes are prepared using guide RNAs (crRNA:tracrRNA) and Cas9 nuclease (Aldevron, Fargo, ND). Integration of the uORF sequence into the NPR1 gene is carried out using procedures similar to those described in Examples 13-16.

[0457] Similar genomic modification is carried out in maize whole plants or in maize plant tissues using procedures as described in Examples 31-34.

TABLE 16

| | | SEQ | |
|---|---|---|---|
| | | ID | Cate- |
| Name | Sequence | NO | gory |
| Zm00001d0540 | TCCATCCTC | SEQ | DNA; |
| 60 | GCTCTACCT | ID | Zea |
| NRT2.2 | GCCTGCTGC | NO: | mays |
| | CAGTTTCAA | 381 | |
| | CTCTCCAAG | | |
| | GTCAACGCC | | |
| | AGCCCTCGC | | |
| | GCGCTTGGT | | |
| | GTACTCTAG | | |
| | TTTAGTACA | | |
| | CCAATCCGC | | |
| | ATGCATTCT | | |
| | TTTTTGTTT | | |
| | GTTTGTTTG | | |
| | TTTGTTTGT | | |
| | TTTGATTGA | | |
| | CAAATATAT | | |
| | GCGGCAGAG | | |
| | TTAAGAACG | | |
| | AATCGACTC | | |
| | CGTCGTCTC | | |
| | GGCTAGTCG | | |
| | ACC | | |
| Zm00001d0518 | AGGGGCTTG | SEQ | DNA; |
| 04 GLN1.4 | ACGCCTTAC | ID | Zea |
| | CAGTACGCG | NO: | mays |
| | GTGCTCCCT | 382 | |
| | CTTCTCGCA | | |
| | CCTACCGCA | | |
| | CGGAGGATA | | |
| | TGACCTAAT | | |
| | ACAATTAAT | | |
| | TTACGCGGA | | |
| | ACTCGAAAT | | |
| | GTATCCGTA | | |
| | TTTATACGT | | |
| | GTGGAACGT | | |
| | ACAAGTATA | | |
| | CGTATTTTG | | |
| | TTGGTTTTT | | |
| | TTTTTACTT | | |
| | TTTACCCGG | | |
| | CTGGACGCC | | |
| | AACCAACTG | | |
| | GTTTCCCGT | | |
| | CCT | | |
| Zm00001d0312 | CGGGCCCAC | SEQ | DNA; |
| 78 Dof1 | GGGAGGTCG | ID | Zea |
| | CGTCGATTC | NO: | mays |
| | GCAGCAGCG | 383 | |
| | CGCCGCCCC | | |
| | CCTCCCCAC | | |
| | CACCACGTC | | |
| | AAGCGGCGT | | |
| | GGGCTTCCG | | |
| | CCCCTCCCT | | |
| | GCCCGCCGC | | |
| | GTGGGCCCC | | |
| | CACTCGCGT | | |
| | CCTGTAACC | | |
| | GGGATAGCG | | |
| | TGAGCACGT | | |
| | CGCTATCGT | | |
| | CCGTAACGG | | |
| | CGACCGCGA | | |
| | CCATAAGAG | | |
| | AGGAGGCAA | | |
| | AGCCAGCCC | | |
| | CCG | | |
| Zm00001d0454 | AGCACGGAC | SEQ | DNA; |
| 50 EPSPS | GATCCTTTA | ID | Zea |
| | CGTTGTTTT | NO: | mays |
| | TAACAAACT | 384 | |
| | TTGTCAGAA | | |
| | AACTAGCAT | | |
| | CATTAACTT | | |
| | CTTAATGAC | | |
| | GATTTCACA | | |
| | ACAAAAAAA | | |
| | GGTAACCTC | | |
| | GCTACTAAC | | |
| | ATAACAAAA | | |
| | TACTTGTTG | | |
| | CTTATTAAT | | |
| | TATATGTTT | | |
| | TTTAATCTT | | |
| | TGATCAGGG | | |
| | GACAACAGT | | |
| | GGTTGATAA | | |
| | CCTGTTGAA | | |
| | CAGTGAGGA | | |
| | TGT | | |
| Zm00001d0126 | ATTCCGTTG | SEQ | DNA; |
| 60 NPR1 | GACCCCTAC | ID | Zea |
| | CGCTCCTCA | NO: | mays |
| | GTCAGTCCT | 385 | |
| | CGCCCCTCC | | |
| | CAGCACCGG | | |
| | CCAACAATC | | |
| | CCTCACGTT | | |
| | ATTCCCTGT | | |
| | AGCTACTAT | | |
| | GCTGCCCTC | | |
| | TTGGATCCC | | |
| | TTTTTCACT | | |
| | TGTCTGAGA | | |
| | TTTAGCCAC | | |
| | CGCCCGGTA | | |
| | GGAAGAAGA | | |
| | AGGGGAAGC | | |
| | ACCATATTT | | |
| | TCTGTTCCT | | |
| | GGCCTGACG | | |
| | CAGCGCCGG | | |
| | TGA | | |
| Zm00001d0401 | CAAGCAAGC | SEQ | DNA; |
| 30 FEA3 (3′- | AGGTTCAGA | ID | Zea |
| UTR) | AGAAGAACA | NO: | mays |
| | CGGAGAAAC | 386 | |
| | TTGAAGTAA | | |
| | TGCTAGGTA | | |
| | GGTTAGCAC | | |
| | GAAGTAGTT | | |
| | TCTGCGCGT | | |
| | TCTCTGTGA | | |
| | TCTTTTGGC | | |
| | ATTTGTTTT | | |
| | TGGCTGCTG | | |
| | GTGGCTTAC | | |
| | CATCGTCAG | | |
| | ATGGTGACG | | |
| | GAGGAAGGA | | |
| | GGGAACATG | | |
| | GATCTGGAT | | |
| | GGTGTGAGC | | |
| | CACAGATTA | | |
| | CATTACAGT | | |
| | AGTAGAGTA | | |
| | AACTATGAG | | |
| | AGTTCTTGT | | |
| | GGACTGAAG | | |
| | GTGTGTAGT | | |
| | GGTGGATAG | | |
| | GGTAGCTTC | | |
| | TCCGGGGTT | | |
| | CTTTTGTGT | | |
| | G | | |
| Zm00001d0401 | GACTTCTGAG | SEQ | DNA; |
| 30 FEA3 | CGAGGAGTGG | ID | Zea |
| | ACGAGTGGTG | NO: | mays |
| | TGCCGTCGTC | 387 | |
| | CGGTTCCCGT | | |
| | TGGTTTGGCG | | |
| | ATGAGGCGCG | | |
| | CTCGCGGTCG | | |
| | CCGCGGGCTG | | |
| | CTGCTTCTCC | | |
| | TCGGCGTGGC | | |
| | GCTCTCGGCG | | |
| | GCTGCGCTGC | | |
| | TCCGTGGCTG | | |
| | CGCGGGGCAG | | |
| | CAAGGGGAGG | | |
| | ACGGCTCGGA | | |
| | CGCCCCTGCG | | |
| | GCGGCGGCGG | | |
| | CGGAGACGGC | | |
| | CCCCATGGAG | | |
| | GAGAAGGAGC | | |
| | GCAGGGCGCT | | |
| | GTACGCCGCC | | |
| | ATCGAGAGCT | | |
| | TCGTCGGCAA | | |
| | GGGGTGGAAC | | |
| | GGCTCCGGGC | | |
| | TCTACCCAGA | | |
| | CCCCTGCGGC | | |
| | TGGTCTC | | |

TABLE 17

| | | Orien- | | | |
|---|---|---|---|---|---|
| | | tation | | | |
| | | (rela- | | | |
| | | tive | | | |
| | | to gene | | SEQ | |
| | Guide | se- | Cut | ID | Cate- |
| Gene | (crRNA) | quence) | site | NO | gory |
| NRT2.2 | CAAACAAA | reverse | 101 | SEQ | RNA; |
| ZM0000 | AAAGAAUG | | | ID | arti- |
| 1D0540 | CAUGGUUU | | | NO: | fi- |
| 60 | UAGAGCUA | | | 397 | cial |
| | UGCU | | | | |
| GLN1.4 | UGUAUCCG | forward | 115 | SEQ | RNA; |
| ZM0000 | UAUUUAUA | | | ID | arti- |
| 1D0518 | CGUGGUUU | | | NO: | fi- |
| 04 | UAGAGCUA | | | 398 | cial |
| | UGCU | | | | |
| Dof1 | GACGCGAG | reverse | 101 | SEQ | RNA; |
| ZM0000 | UGGGGGCC | | | ID | arti- |
| 1D0312 | CACGGUUU | | | NO: | fi- |
| 78 | UAGAGCUA | | | 399 | cial |
| | UGCU | | | | |
| EPSPS | AUUUUGUU | reverse | 101 | SEQ | RNA; |
| ZM0000 | AUGUUAGU | | | ID | arti- |
| 1D0454 | AGCGGUUU | | | NO: | fi- |
| 50 | UAGAGCUA | | | 400 | cial |
| | UGCU | | | | |
| NPR1 | AAGUGAAA | reverse | 101 | SEQ | RNA; |
| ZM0000 | AAGGGAUC | | | ID | arti- |
| 1D0126 | CAAGGUUU | | | NO: | fi- |
| 60 | UAGAGCUA | | | 401 | cial |
| | UGCU | | | | |
| FEA3 | GCAGGUUC | forward | 25 | SEQ | RNA; |
| ZM0000 | AGAAGAAG | | | ID | arti- |
| 1D0401 | AACAGUUU | | | NO: | fi- |
| 30 | UAGAGCUA | | | 402 | cial |
| | UGCU | | | | |
| FEA3 | CCAUGUCA | Forward | 143 | SEQ | RNA; |
| ZM0000 | GAUGGUGA | | | ID | arti- |
| 1D0401 | CGGGUUUU | | | NO: | fi- |
| 30 | AGAGCUAU | | | 403 | cial |
| | GCU | | | | |
| FEA3 | UGGAUAGG | forward | 263 | SEQ | RNA; |
| ZM0000 | GUAGCUUC | | | ID | arti- |
| 1D0401 | UCCG GUU | | | NO: | fi- |
| 30 | UUAGAGCU | | | 404 | cial |
| | AUGCU | | | | |
| FEA3 | GCGCUCCU | reverse | 207 | SEQ | RNA; |
| ZM0000 | UCUCCUCC | | | ID | arti- |
| 1D0401 | AUGUUUUA | | | NO: | fi- |
| 30 | GAGCUAUG | | | 405 | cial |
| | CU | | | | |
| FEA3 | CCUCGGCG | forward | 115 | SEQ | RNA; |
| ZM0000 | UGGCGCUC | | | ID | arti- |
| 1D0401 | UCGGGUUU | | | NO: | fi- |
| 30 | UAGAGCUA | | | 406 | cial |
| | UGCU | | | | |

### Example 21

[0458] This example illustrates culture conditions effective in improving viability of plant cells or plant protoplasts. More specifically, this non-limiting example describes media and culture conditions for improving viability of isolated plant protoplasts.

[0459] Table 18 provides the compositions of different liquid basal media suitable for culturing plant cells or plant protoplasts; final pH of all media was adjusted to 5.8 if necessary.

TABLE 18

| | Concentration (mg/L unless otherwise noted) | | | | |
|---|---|---|---|---|---|
| Component | SH | 8p | PIM | P2 | YPIM B- |
| Casamino acids | | 250 | | | |
| Coconut water | | 20000 | | | |
| Ascorbic acid | | 2 | | | |
| biotin | | 0.01 | 0.01 | | |
| Cholicalciferol (Vitamin D-3) | | 0.01 | | | |
| choline chloride | | 1 | | | |
| Citric acid | | 40 | | | |
| Cyanocobalamin (Vitamin B-12) | | 0.02 | | | |
| D-calcium pantothenate | | 1 | 1 | | |
| D-Cellobiose | | 250 | | | |
| D-Fructose | | 250 | | | |
| D-Mannose | | 250 | | | |
| D-Ribose | | 250 | | | |
| D-Sorbitol | | 250 | | | |
| D-Xylose | | 250 | | | |
| folic acid | | 0.4 | 0.2 | | |
| Fumaric acid | | 40 | | | |
| L-Malic acid | | 40 | | | |
| L-Rhamnose | | 250 | | | |
| p-Aminobenzoic acid | | 0.02 | | | |
| Retinol (Vitamin A) | | 0.01 | | | |
| Riboflavin | | 0.2 | | | |
| Sodium pyruvate | | 20 | | | |
| 2,4-D | 0.5 | 0.2 | 1 | 5 | 1 |
| 6-benzylaminopurine (BAP) | | | | | 1 |
| Indole-3-butyric acid (IBA) | | | | 2.5 | |
| Kinetin | 0.1 | | | | |
| Naphthaleneacetic acid (NAA) | | 1 | | | |
| parachlorophenoxyacetate (pCPA) | 2 | | | | |
| Thidiazuron | | | 0.022 | | |
| Zeatin | | 0.5 | | | |
| AlCl3 | | | 0.03 | | |
| Bromocresol purple | | | 8 | | |
| CaCl₂•2H₂O | 200 | 600 | 440 | 200 | 440 |
| CoCl₂•6H₂O | 0.1 | 0.025 | | 0.1 | |
| CuSO₄•5H₂O | 0.2 | 0.025 | 0.03 | 0.2 | 0.03 |
| D-Glucose | | 68400 | 40000 | | 40000 |
| D-Mannitol | 52000 | 250 | 60000 | 52000 | 60000 |
| FeSO₄•7H₂O | 15 | 27.8 | 15 | 15 | 15 |
| H₃BO₃ | 5 | 3 | 1 | 5 | 1 |
| KCl | | 300 | | | |
| KH₂PO₄ | | 170 | 170 | | 170 |
| KI | 1 | 0.75 | 0.01 | 1 | 0.01 |
| KNO₃ | 2500 | 1900 | 505 | 2500 | 505 |
| MES pH 5.8 (mM) | | | 3.586 | 25 | 25 |
| MgSO₄•7H₂O | 400 | 300 | 370 | 400 | 370 |
| MnSO₄•H₂O | 10 | 10 | 0.1 | 10 | 0.1 |
| Na₂EDTA | 20 | 37.3 | 20 | 20 | 20 |
| Na₂MoO₄•2H₂O | 0.1 | 0.25 | | 0.1 | |
| NH₄H₂PO₄ | 300 | | | 300 | |
| NH₄NO₃ | | 600 | 160 | | 160 |
| NiCl₂•6H₂O | | | 0.03 | | |
| Sucrose | 30000 | 2500 | | 30000 | |
| ZnSO₄•7H₂O | 1 | 2 | 1 | 1 | 1 |
| Tween-80 (microliter/L) | | | 10 | | 10 |
| Inositol | 1000 | 100 | 100 | 1000 | 100 |
| Nicotinamide | | 1 | | | |
| Nicotinic acid | 5 | | 1 | 5 | 1 |
| Pyridoxine•HCl | 0.5 | 1 | 1 | 0.5 | 1 |
| Thiamine•HCl | 5 | 1 | 1 | 5 | 1 |

* Sources for basal media:
SH—Schenk and Hildebrandt, Can. J. Bot. 50: 199 (1971).
8p—Kao and Michayluk, Planta 126: 105 (1975).
P2—SH but with hormones from Potrykus et al., Mol. Gen. Genet. 156: 347 (1977).
PIM—Chupeau et al., The Plant Cell 25: 2444 (2013).

### Example 22

[0460] This example illustrates culture conditions effective in improving viability of plant cells or plant protoplasts. More specifically, this non-limiting example describes methods for encapsulating isolated plant protoplasts.

[0461] When protoplasts are encapsulated in alginate or pectin, they remain intact far longer than they would in an equivalent liquid medium. In order to encapsulate protoplasts, a liquid medium (“calcium base”) is prepared that is in all other respects identical to the final desired recipe with the exception that the calcium (usually CaCl₂)·2H2O) is increased to 80 millimolar. A second medium (“encapsulation base”) is prepared that has no added calcium but contains 10 g/L of the encapsulation agent, e. g., by making a 20 g/L solution of the encapsulation agent and adjusting its pH with KOH or NaOH until it is about 5.8, making a 2× solution of the final medium (with no calcium), then combining these two solutions in a 1:1 ratio. Encapsulation agents include alginate (e. g., alginic acid from brown algae, catalogue number A0682, Sigma-Aldrich, St. Louis, MO) and pectin (e. g., pectin from citrus peel, catalogue number P9136, Sigma-Aldrich, St. Louis, MO; various pectins including non-amidated low-methoxyl pectin, catalogue number 1120-50 from Modernist Pantry, Portsmouth, NH). The solutions, including the encapsulation base solution, is filter-sterilized through a series of filters, with the final filter being a 0.2-micrometer filter. Protoplasts are pelleted by gentle centrifugation and resuspended in the encapsulation base; the resulting suspension is added dropwise to the calcium base, upon which the protoplasts are immediately encapsulated in solid beads.

### Example 23

[0462] This example illustrates culture conditions effective in improving viability of plant cells or plant protoplasts. More specifically, this non-limiting example describes observations of effects on protoplast viability obtained by adding non-conventionally high levels of divalent cations to culture media.

[0463] Typical plant cell or plant protoplast media contain between about 2 to about 4 millimolar calcium cations and between about 1-1.5 millimolar magnesium cations. In the course of experiments varying and adding components to media, it was discovered that the addition of non-conventionally high levels of divalent cations had a surprisingly beneficial effect on plant cell or plant protoplast viability. Beneficial effects on plant protoplast viability begin to be seen when the culture medium contains about 30 millimolar calcium cations (e. g., as calcium chloride) or about 30 millimolar magnesium cations (e. g., as magnesium chloride). Even higher levels of plant protoplast viability were observed with increasing concentrations of calcium or magnesium cations, i. e., at about 40 millimolar or about 50 millimolar calcium or magnesium cations. The result of several titration experiments indicated that greatest improvement in protoplast viability was seen using media containing between about 50 to about 100 millimolar calcium cations or 50 to about 100 millimolar magnesium cations; no negative effects on protoplast viability or physical appearance was observed at these high cation levels. This was observed in multiple experiments using protoplasts obtained from several plant species including maize (multiple germplasms, e. g., B73, A188, B104, HiIIA, HiIIB, BMS), rice, wheat, soy, kale, and strawberry; improved protoplast viability was observed in both encapsulated protoplasts and non-encapsulated protoplasts. Addition of potassium chloride at the same levels had no effect on protoplast viability. It is possible that inclusion of slightly lower (but still non-conventionally high) levels of divalent cations (e. g., about 10 millimolar, about 15 millimolar, about 20 millimolar, or about 25 millimolar calcium cations or magnesium cations) in media is beneficial for plant cells or plant protoplasts of additional plant species.

### Example 24

[0464] This example illustrates culture conditions effective in improving viability of plant cells or plant protoplasts. More specifically, this non-limiting example describes observations of effects on maize protoplast viability obtained by adding non-conventionally high levels of divalent cations to culture media.

[0465] Separate suspensions of maize B73 and A188 protoplasts (2×10\hat{ }5 cells per milliliter) were prepared in YPIM B-liquid medium containing various combinations of the added salts calcium chloride, potassium ascorbate, and magnesium chloride or magnesium sulfate. One-half milliliter aliquots of the suspensions were dispensed into a 24-well microtiter plate in the arrangement shown in Table 19, which lists the concentrations of calcium chloride (“Ca”), potassium ascorbate (“A”), and magnesium chloride (“MgCl2”) or magnesium sulfate (“MgSO4”) in millimolar values.

TABLE 19

| | | | | | |
|---|---|---|---|---|---|
| YPIM B- | Ca = 0, A = 0.1 | Ca = 0, A = 0.2 | Ca = 0, A = 0.5 | Ca = 0, A = 1 | YPIM B- |
| Ca = 50, A = 0 | Ca = 50, A = 0.1 | Ca = 50, A = 0.2 | Ca = 50, A = 0.5 | Ca = 50, A = 1 | YPIM B- |
| Ca = 100, A = 0 | Ca = 100, A = 0.1 | Ca = 100, A = 0.2 | Ca = 100, A = 0.5 | Ca = 100, A = 1 | YPIM B- |
| YPIM B- | MgCl₂ = 50 | MgCl₂ = 100 | MgSO₄ = 50 | MgSO₄ = 100 | YPIM B- |

[0466] Viability was judged by Evans blue staining and visualization under a light microscope. After 96 hours, both maize species were still highly viable in all wells. After 288 hours, there were clear differences at various calcium and magnesium concentrations, but only slight effects at various ascorbate concentrations.

[0467] The observations at 288 hours were recorded as follows: Maize B73: protoplasts in all Ca=0 wells appeared small and dead; protoplasts in Ca=50 wells appeared larger but were now also almost all dead; protoplasts in Ca=100 wells still appeared larger and had a viability of between 10-20%. Protoplasts in MgCl2=50 wells were similar to those in Ca=100 wells, and protoplasts in MgCl2=100 wells had much higher viability than any well. Wells with MgSO4=50 or 100 showed only a modest improvement in protoplast viability. Maize A188: protoplasts in all Ca=0 wells appeared small and dead; protoplasts in Ca=50 wells appeared and had about 20% viability; protoplasts in Ca=100 wells had about 70% viability and were visibly healthier. Addition of ascorbate at 0.2 millimolar and above to the wells with added calcium appeared to slightly decrease viability. Wells with MgSO4=50 had about 30-40% viability, and wells with MgCl2=100 had about 70% viability. Wells with MgSO4=50 or 100 showed only a modest improvement in protoplast viability. These results demonstrate that calcium chloride or magnesium chloride added at non-conventionally high levels improved maize protoplast viability over a culture time of ˜12 days.

### Example 25

[0468] This example illustrates culture conditions effective in improving viability of plant cells or plant protoplasts. More specifically, this non-limiting example describes observations of effects on maize, soybean, and strawberry protoplast viability obtained by adding non-conventionally high levels of divalent cations to culture media. Separate suspensions of maize B73, winter wheat, soy, and strawberry protoplasts (2×10\hat{ }5 cells per milliliter) were prepared in YPIM B-liquid medium containing calcium chloride at 0, 50, or 100 millimolar. One-half milliliter aliquots of the suspensions were dispensed into a 24-well microtiter plate.

[0469] Viability at day 8 of culture was judged by visualization under a light microscope. At this point, the viability of the maize protoplasts in the 0, 50, and 100 millimolar calcium conditions was 10%, 30%, and 80%, respectively. There were no large differences observed at this time point for protoplasts of the other species.

[0470] Viability at day 13 was judged by Evans blue staining and visualization under a light microscope. At this point, the viability of the maize protoplasts in the 0, 50, and 100 millimolar calcium conditions was 0%, 0%, and 10%, respectively; viability of the soybean protoplasts in the 0, 50, and 100 millimolar calcium conditions was 0%, 50%, and 50%, respectively; and viability of the maize protoplasts in the 0 and 50 millimolar calcium conditions was 0% and 50%, respectively (viability was not measured for the 100 millimolar condition). These results demonstrate that culture conditions including calcium cations at 50 or 100 millimolar improved viability of both monocot and dicot protoplasts over a culture time of ˜13 days.

### Example 26

[0471] This example illustrates culture conditions effective in improving viability of plant cells or plant protoplasts. More specifically, this non-limiting example describes observations of effects on maize protoplast viability obtained by adding non-conventionally high levels of divalent cations to culture media.

[0472] Separate suspensions of maize A188 protoplasts (2×10\hat{ }5 cells per milliliter) were prepared in YPIM B-liquid medium containing calcium chloride at 0 or 50 millimolar. One-half milliliter aliquots of the suspensions were dispensed into a 24-well microtiter plate.

[0473] Viability was judged by visualization under a light microscope. At 96 hours, protoplasts grown with 50 millimolar calcium cations appeared healthier than those grown with no added calcium. At 168 hours (7 days), wells with 50 millimolar calcium cations still contained very many large, healthy-looking protoplasts, whereas protoplasts in the wells with no added calcium were nearly all dead. This experiment was carried on to day 20, at which point the protoplasts in the wells with 50 millimolar calcium had generated cell walls and undergone at least some cell division. These results demonstrate that culture conditions including calcium cations at 50 millimolar improved viability, cell wall regeneration, and cell division of maize protoplasts over a culture time of at least 7 to 20 days.

### Example 27

[0474] This example illustrates culture conditions effective in improving viability of plant cells or plant protoplasts. More specifically, this non-limiting example describes observations of effects on maize protoplast viability obtained by adding non-conventionally high levels of divalent cations to culture media.

[0475] Separate suspensions of maize B73 protoplasts (2×10\hat{ }5 cells per milliliter) were prepared in PIM B-liquid medium (identical to YPIM B-medium except with the 6-benzylaminopurine substituted with 0.022 milligrams/L thidiazuron) containing calcium chloride added at 0, 5, 20, 40, 70, or 100 millimolar. One-half milliliter aliquots of the suspensions were dispensed into a 24-well microtiter plate.

[0476] Viability was judged by visualization under a light microscope at day 7 and at day 14 of culture. In this experiment, by day 7 the maize protoplasts were dead in the wells containing less than 40 millimolar calcium; the maize protoplasts in the wells containing 40, 70, or 100 millimolar calcium formed clusters of viable, healthy cells with cell division occurring, with the strongest enhanced viability and cell division observed at 100 millimolar calcium. These results demonstrate that culture conditions including calcium cations at 40, 70, or 100 improved viability, cell wall regeneration, and cell division of maize protoplasts over a culture time of at least 7 to 14 days.

### Example 28

[0477] This example illustrates culture conditions effective in improving viability of plant cells or plant protoplasts. More specifically, this non-limiting example describes observations of effects on maize protoplast viability obtained by adding non-conventionally high levels of divalent cations to culture media.

[0478] Separate suspensions of maize B73 and A188 protoplasts (2×10\hat{ }5 cells per milliliter) were prepared in PIM B-liquid medium (identical to YPIM B-medium except with the 6-benzylaminopurine substituted with 0.022 milligrams/L thidiazuron) containing calcium chloride added at 0 or 50 millimolar. One-half milliliter aliquots of the suspensions were dispensed into a 24-well microtiter plate.

[0479] Viability was judged by visualization under a light microscope. In this experiment, by day 6 the maize A188 protoplasts were about 40% viable in the wells containing no added calcium but showed much higher viability in the wells containing 50 millimolar calcium, where several wells showed 100% viability. The maize B73 protoplasts in the wells containing no added calcium had all died, but wells containing 50 millimolar calcium still contained viable cells.

### Example 29

[0480] This example illustrates culture conditions effective in improving viability of plant cells or plant protoplasts. More specifically, this non-limiting example describes observations of effects on maize protoplast viability obtained by adding non-conventionally high levels of divalent cations or a low-molecular-weight antioxidant to culture media.

[0481] Separate suspensions of maize B73 and A188 protoplasts (2×10\hat{ }5 cells per milliliter) were prepared in YPIM B-liquid medium containing (a) calcium chloride added at 100 millimolar, or (b) 1 millimolar glutathione, or (c) no added calcium or glutathione. One-milliliter aliquots of the suspensions were dispensed into a 24-well microtiter plate. At 16, 40, 64, and 136 hours of culture, 50-microliter samples were taken for hemocytometer analysis from each well; for the plates containing maize A188 protoplasts, parallel 50-microliter samples were taken from a replicate well at 16, 40, and 64 hours of culture for quantification using a Cellometer cell counter (Nexcelom Bioscience LLC, Lawrence, MA).

[0482] Viability was determined by Evans blue staining and quantification using a hemocytometer. Under conditions with high concentrations of calcium, Evans blue can create precipitates that interfere with cell counting; to prevent this, 5 microliters of an EDTA solution was added to the samples from the wells containing 100 millimolar calcium chloride immediately prior to staining. Results from the hemocytometer analysis are provided in Table 20 (results from the Cellometer analysis were very similar); “Control”=YPIM B-medium with no added calcium or glutathione. These results demonstrate that inclusion in the medium of either non-conventionally high (100 millimolar) calcium cations or the low-molecular-weight thiol antioxidant glutathione resulted in increasing protoplast viability of both maize lines by (a) at least 10% higher after 30 hours (in this example, about 10-34% higher at 40 hours) culture; (b) at least 10% higher after 48 hours' culture hours (in this example, between 17-53% higher at 64 hours); or (c) at least 10% higher after 72 hours' culture hours or at least 10% higher after 96 hours' culture hours (in this example, about 12—at least 46% higher at 138 hours).

TABLE 20

Viability (%)

| Cell Type | Hours | Control | 100 mM Ca | 1 mM GSH |
|---|---|---|---|---|
| B73 | 0 | 90 | 90 | 90 |
| | 16 | 65 | 65 | 77 |
| | 40 | 38 | 57 | 72 |
| | 64 | 31 | 58 | 48 |
| | 136 | 12 | 30 | 24 |
| A188 | 0 | 90 | 90 | 90 |
| | 16 | 60 | 67 | 69 |
| | 40 | 40 | 57 | 50 |
| | 64 | 6 | 59 | 50 |
| | 136 | 0 | 46 | 42 |

### Example 30

[0483] This example illustrates culture conditions effective in improving viability of plant cells or plant protoplasts. More specifically, this non-limiting example describes observations of effects on maize protoplast viability obtained by adding non-conventionally high levels of divalent cations to culture media.

[0484] Separate suspensions of maize protoplasts from five different germplasm lines (A188, B73, B104, HiIIA, HiIIB) (2×10\hat{ }5 cells per milliliter) were prepared in YPIM B-liquid medium containing calcium chloride added at 0, 50, or 100 millimolar. One-half milliliter aliquots of the suspensions were dispensed into a 24-well microtiter plate.

[0485] Viability was judged by visualization under a light microscope. At 19 hours, protoplasts of all five maize lines grown under the different conditions appeared healthy, with large proportions of round, green cells; slightly more debris was observed in the 0 calcium conditions. At 34 hours, protoplasts of all five maize lines showed a response to the increased calcium conditions similar to what had been previously observed; across the five maize lines, viability of protoplasts grown without added calcium was about 40%, while those grown with 50 millimolar calcium was about 55%, and those grown with 100 millimolar calcium was about 70%. These results demonstrate that culture conditions including calcium cations at 50 or 100 millimolar improved viability of protoplasts from various maize germplasm over a culture time of 34 hours.

### Example 31

[0486] This example illustrates genome editing in plants and further illustrates a method of delivering gene-editing effector molecules into a plant cell. This example describes introducing at least one double-strand break (DSB) in a genome in a plant cell or plant protoplast, by delivering at least one effector molecules to the plant cell or plant protoplast using at least one physical agent, such as a particulate, microparticulate, or nanoparticulate. More specifically, this non-limiting example illustrates introducing at least one double-strand break (DSB) in a genome in a plant cell or plant protoplast by contacting the plant cell or plant protoplast with a composition including at least one sequence-specific nuclease and at least one physical agent, such as at least one nanocarrier. Embodiments include those wherein the nanocarrier comprises metals (e. g., gold, silver, tungsten, iron, cerium), ceramics (e. g., aluminum oxide, silicon carbide, silicon nitride, tungsten carbide), polymers (e. g., polystyrene, polydiacetylene, and poly(3,4-ethylenedioxythiophene) hydrate), semiconductors (e. g., quantum dots), silicon (e. g., silicon carbide), carbon (e. g., graphite, graphene, graphene oxide, or carbon nanosheets, nanocomplexes, or nanotubes), composites (e. g., polyvinylcarbazole/graphene, polystyrene/graphene, platinum/graphene, palladium/graphene nanocomposites), a polynucleotide, a poly(AT), a polysaccharide (e. g., dextran, chitosan, pectin, hyaluronic acid, and hydroxyethylcellulose), a polypeptide, or a combination of these. In embodiments, such particulates and nanoparticulates are further covalently or non-covalently functionalized, or further include modifiers or cross-linked materials such as polymers (e. g., linear or branched polyethylenimine, poly-lysine), polynucleotides (e. g., DNA or RNA), polysaccharides, lipids, polyglycols (e. g., polyethylene glycol, thiolated polyethylene glycol), polypeptides or proteins, and detectable labels (e. g., a fluorophore, an antigen, an antibody, or a quantum dot). Embodiments include those wherein the nanocarrier is a nanotube, a carbon nanotube, a multi-walled carbon nanotube, or a single-walled carbon nanotube. Specific nanocarrier embodiments contemplated herein include the single-walled carbon nanotubes, cerium oxide nanoparticles (“nanoceria”), and modifications thereof (e. g., with cationic, anionic, or lipid coatings) described in Giraldo et al. (2014) Nature Materials, 13:400-409; the single-walled carbon nanotubes and heteropolymer complexes thereof described in Zhang et al. (2013) Nature Nanotechnol., 8:959-968 (doi:10.1038/NNANO.2013.236); the single-walled carbon nanotubes and heteropolymer complexes thereof described in Wong et al. (2016) Nano Lett., 16:1161-1172; and the various carbon nanotube preparations described in US Patent Application Publication US 2015/0047074 and International Patent Application PCT/US2015/050885 (published as WO 2016/044698 and claiming priority to U.S. Provisional Patent Application 62/052,767), all of which patent applications are incorporated in their entirety by reference herein. See also, for example, the various types of particles and nanoparticles, their preparation, and methods for their use, e. g., in delivering polynucleotides and polypeptides to cells, disclosed in US Patent Application Publications 2010/0311168, 2012/0023619, 2012/0244569, 2013/0145488, 2013/0185823, 2014/0096284, 2015/0040268, 2015/0047074, and 2015/0208663, all of which are incorporated herein by reference in their entirety.

[0487] In these examples, single-walled carbon nanotubes (SWCNT) and modifications thereof are prepared as described in Giraldo et al. (2014) Nature Materials, 13:400-409; Zhang et al. (2013) Nature Nanotechnol., 8:959-968; Wong et al. (2016) Nano Lett., 16:1161-1172; US Patent Application Publication US 2015/0047074; and International Patent Application PCT/US2015/050885 (published as WO 2016/044698). In an initial experiment, a DNA plasmid encoding green fluorescent protein (GFP) as a reporter is non-covalently complexed with a SWCNT preparation and tested on various plant cell preparations including plant cells in suspension culture, plant callus, plant embryos, intact or half seeds, and shoot apical meristem. Delivery to the plant callus, embryos, seeds, and meristem is by treatment with pressure, centrifugation, bombardment, microinjection, infiltration (e. g., with a syringe), or by direct application to the surface of the plant tissue. Efficiency of the SWCNT delivery of GFP across the plant cell wall and the cellular localization of the GFP signal is evaluated by microscopy.

[0488] In another experiment, plasmids encoding Cas9 and at least one guide RNA (gRNA), are non-covalently complexed with a SWCNT preparation and tested on various plant cell preparations including plant cells in suspension culture, plant callus, plant embryos, intact or half seeds, and shoot apical meristem. Delivery to the plant callus, embryos, seeds, and meristem is by treatment with pressure, centrifugation, bombardment, microinjection, infiltration (e. g., with a syringe), or by direct application to the surface of the plant tissue. The gRNA is designed to target the endogenous plant gene phytoene desaturase (PDS) for silencing, where PDS silencing produces a visible phenotype (bleaching, or low/no chlorophyll).

[0489] In another experiment, RNA encoding Cas9 and at least one guide RNA (gRNA), are non-covalently complexed with a SWCNT preparation and tested on various plant cell preparations including plant cells in suspension culture, plant callus, plant embryos, intact or half seeds, and shoot apical meristem. Delivery to the plant callus, embryos, seeds, and meristem is by treatment with pressure, centrifugation, bombardment, microinjection, infiltration (e. g., with a syringe), or by direct application to the surface of the plant tissue. The gRNA is designed to target the endogenous plant gene phytoene desaturase (PDS) for silencing, where PDS silencing produces a visible phenotype (bleaching, or low/no chlorophyll).

[0490] In another experiment, a ribonucleoprotein (RNP), prepared by complexation of Cas9 nuclease and at least one guide RNA (gRNA), is non-covalently complexed with a SWCNT preparation and tested on various plant cell preparations including plant cells in suspension culture, plant callus, plant embryos, intact or half seeds, and shoot apical meristem. Delivery to the plant callus, embryos, seeds, and meristem is by treatment with pressure, centrifugation, bombardment, microinjection, infiltration (e. g., with a syringe), or by direct application to the surface of the plant tissue. The gRNA is designed to target the endogenous plant gene phytoene desaturase (PDS) for silencing, where PDS silencing produces a visible phenotype (bleaching, or low/no chlorophyll).

[0491] One of skill in the art would recognize that the above general compositions and procedures can be modified or combined with other reagents and treatments, such as those described in detail in the paragraphs following the heading “Delivery Methods and Delivery Agents”. In addition, the single-walled carbon nanotubes (SWCNT) and modifications thereof prepared as described in Giraldo et al. (2014) Nature Materials, 13:400-409; Zhang et al. (2013) Nature Nanotechnol., 8:959-968; Wong et al. (2016) Nano Lett., 16:1161-1172; US Patent Application Publication US 2015/0047074; and International Patent Application PCT/US2015/050885 (published as WO 2016/044698) can be used to prepare complexes with other polypeptides or polynucleotides or a combination of polypeptides and polynucleotides (e. g., with one or more polypeptides or ribonucleoproteins including at least one functional domain selected from the group consisting of: transposase domains, integrase domains, recombinase domains, resolvase domains, invertase domains, protease domains, DNA methyltransferase domains, DNA hydroxylmethylase domains, DNA demethylase domains, histone acetylase domains, histone deacetylase domains, nuclease domains, repressor domains, activator domains, nuclear-localization signal domains, transcription-regulatory protein (or transcription complex recruiting) domains, cellular uptake activity associated domains, nucleic acid binding domains, antibody presentation domains, histone modifying enzymes, recruiter of histone modifying enzymes, inhibitor of histone modifying enzymes, histone methyltransferases, histone demethylases, histone kinases, histone phosphatases, histone ribosylases, histone deribosylases, histone ubiquitinases, histone deubiquitinases, histone biotinases, and histone tail proteases).

### Example 32

[0492] This example illustrates genome editing in plants and further illustrates a method of delivering gene-editing effector molecules into a plant cell. More specifically, this non-limiting example describes introducing at least one double-strand break (DSB) in a genome in a plant cell or plant protoplast, by contacting the plant cell or plant protoplast with a composition including a sequence-specific nuclease complexed with a gold nanoparticle.

[0493] In embodiments, at least one double-strand break (DSB) is introduced in a genome in a plant cell or plant protoplast, by contacting the plant cell or plant protoplast with a composition that includes a charge-modified sequence-specific nuclease complexed to a charge-modified gold nanoparticle, wherein the complexation is non-covalent, e. g., through ionic or electrostatic interactions. In an embodiment, a sequence-specific nuclease having at least one region bearing a positive charge forms a complex with a negatively-charged gold particle; in another embodiment, a sequence-specific nuclease having at least one region bearing a negative charge forms a complex with a positively-charged gold particle. Any suitable method can be used for modifying the charge of the nuclease or the nanoparticle, for instance, through covalent modification to add functional groups, or non-covalent modification (e. g., by coating a nanoparticle with a cationic, anionic, or lipid coating). In embodiments, the sequence-specific nuclease is a type II Cas nuclease having at least one modification selected from the group consisting of: (a) modification at the N-terminus with at least one negatively charged moiety; (b) modification at the N-terminus with at least one moiety carrying a carboxylate functional group; (c) modification at the N-terminus with at least one glutamate residue, at least one aspartate residue, or a combination of glutamate and aspartate residues; (d) modification at the C-terminus with a localization signal, transit, or targeting peptide; (e) modification at the C-terminus with a nuclear localization signal (NLS), a chloroplast transit peptide (CTP), or a mitochondrial targeting peptide (MTP). In embodiments, the type II Cas nuclease is a Cas9 from Streptococcus pyogenes wherein the Cas9 is modified at the N-terminus with at least one negatively charged moiety and modified at the C-terminus with a nuclear localization signal (NLS), a chloroplast transit peptide (CTP), or a mitochondrial targeting peptide (MTP). In embodiments, the type II Cas nuclease is a Cas9 from Streptococcus pyogenes wherein the Cas9 is modified at the N-terminus with a polyglutamate peptide and modified at the C-terminus with a nuclear localization signal (NLS). In embodiments, the gold nanoparticle has at least one modification selected from the group consisting of: (a) modification with positively charged moieties; (b) modification with at least one moiety carrying a positively charged amine; (c) modification with at least one polyamine; (d) modification with at least one lysine residue, at least one histidine residue, at least one arginine residue, at least one guanidine, or a combination thereof. Specific embodiments include those wherein: (a) the sequence-specific nuclease is a type II Cas nuclease modified at the N-terminus with at least one negatively charged moiety and modified at the C-terminus with a nuclear localization signal (NLS), a chloroplast transit peptide (CTP), or a mitochondrial targeting peptide (MTP); and the gold nanoparticle is modified with at least one positively charged moiety; (b) the type II Cas nuclease is a Cas9 from Streptococcus pyogenes modified at the N-terminus with a polyglutamate peptide and modified at the C-terminus with a nuclear localization signal (NLS); and the gold nanoparticle is modified with at least one at least one lysine residue, at least one histidine residue, at least one arginine residue, at least one guanidine, or a combination thereof; (c) the type II Cas nuclease is a Cas9 from Streptococcus pyogenes modified at the N-terminus with a polyglutamate peptide that includes at least 15 glutamate residues and modified at the C-terminus with a nuclear localization signal (NLS); and wherein the gold nanoparticle is modified with at least one at least one lysine residue, at least one histidine residue, at least one arginine residue, at least one guanidine, or a combination thereof. In a specific embodiment, at least one double-strand break (DSB) is introduced in a genome in a plant cell or plant protoplast, by contacting the plant cell or plant protoplast with a composition including a sequence-specific nuclease complexed with a gold nanoparticle, wherein the sequence-specific nuclease is a Cas9 from Streptococcus pyogenes modified at the N-terminus with a polyglutamate peptide that includes at least 15 glutamate residues and modified at the C-terminus with a nuclear localization signal (NLS); and wherein the gold nanoparticle is in the form of cationic arginine gold nanoparticles (ArgNPs), and wherein when the modified Cas9 and the ArgNPs are mixed, self-assembled nanoassemblies are formed as described in Mout et al. (2017) ACS Nano, doi:10.1021/acsnano.6b07600. Other embodiments contemplated herein include the various nanoparticle-protein complexes (e. g., amine-bearing nanoparticles complexed with carboxylate-bearing proteins) described in International Patent Application PCT/US2016/015711, published as International Patent Application Publication WO2016/123514, which claims priority to U.S. Provisional Patent Applications 62/109,389, 62/132,798, and 62/169,805, all of which patent applications are incorporated in their entirety by reference herein.

[0494] In embodiments, the sequence-specific nuclease is an RNA-guided DNA endonuclease, such as a type II Cas nuclease, and the composition further includes at least one guide RNA (gRNA) for an RNA-guided nuclease, or a DNA encoding a gRNA for an RNA-guided nuclease. The method effects the introduction of at least one double-strand break (DSB) in a genome in a plant cell or plant protoplast; in embodiments, the genome is that of the plant cell or plant protoplast; in embodiments, the genome is that of a nucleus, mitochondrion, plastid, or endobiont in the plant cell or plant protoplast. In embodiments, the at least one double-strand break (DSB) is introduced into coding sequence, non-coding sequence, or a combination of coding and non-coding sequence. In embodiments, the plant cell or plant protoplast is a plant cell in an intact plant or seedling or plantlet, a plant tissue, seed, embryo, meristem, germline cells, callus, or a suspension of plant cells or plant protoplasts.

[0495] In embodiments, at least one dsDNA molecule is also provided to the plant cell or plant protoplast, and is integrated at the site of at least one DSB or at the location where genomic sequence is deleted between two DSBs. Embodiments include those wherein: (a) the at least one DSB is two blunt-ended DSBs, resulting in deletion of genomic sequence between the two blunt-ended DSBs, and wherein the dsDNA molecule is blunt-ended and is integrated into the genome between the two blunt-ended DSBs; (b) the at least one DSB is two DSBs, wherein the first DSB is blunt-ended and the second DSB has an overhang, resulting in deletion of genomic sequence between the two DSBs, and wherein the dsDNA molecule is blunt-ended at one terminus and has an overhang on the other terminus, and is integrated into the genome between the two DSBs; (c) the at least one DSB is two DSBs, each having an overhang, resulting in deletion of genomic sequence between the two DSBs, and wherein the dsDNA molecule has an overhang at each terminus and is integrated into the genome between the two DSBs.

[0496] In a non-limiting example, self-assembled green fluorescent protein (GFP)/cationic arginine gold nanoparticles (ArgNPs), nanoassemblies are prepared as described in International Patent Application Publication WO2016/123514. The GFP/ArgNP nanoassemblies are delivered to maize protoplasts and to kale protoplasts prepared as described in Example 1, and to protoplasts prepared from the Black Mexican Sweet (BMS) maize cell line. Efficiency of transfection or delivery is assessed by fluorescence microscopy at time points after transfection (30 minutes, 1 hour, 3 hours, 6 hours, and overnight).

[0497] In a non-limiting example, self-assembled GFP/cationic arginine gold nanoparticles (ArgNPs), nanoassemblies are prepared as described in International Patent Application Publication WO2016/123514. The GFP/ArgNP nanoassemblies are co-incubated with plant cells in suspension culture. Efficiency of transfection or delivery across the plant cell wall is assessed by fluorescence microscopy at time points after transfection (30 minutes, 1 hour, 3 hours, 6 hours, and overnight).

[0498] In a non-limiting example, self-assembled GFP/cationic arginine gold nanoparticles (ArgNPs), nanoassemblies are prepared as described in International Patent Application Publication WO2016/123514. The GFP/ArgNP nanoassemblies are further prepared for Biolistics or particle bombardment and thus delivered to plant cells from suspension cultures transferred to semi-solid or solid media, as well as to rice embryogenic callus. Efficiency of transfection or delivery across the plant cell wall is assessed by fluorescence microscopy at time points after transfection (30 minutes, 1 hour, 3 hours, 6 hours, and overnight).

[0499] In a non-limiting example, self-assembled GFP/cationic arginine gold nanoparticles (ArgNPs), nanoassemblies are prepared as described in International Patent Application Publication WO2016/123514. The GFP/ArgNP nanoassemblies are delivered by infiltration (e. g., using mild positive pressure or negative pressure) into leaves of Arabidopsis thaliana plants. Efficiency of transfection or delivery across the plant cell wall is assessed by fluorescence microscopy at time points after transfection (30 minutes, 1 hour, 3 hours, 6 hours, and overnight).

[0500] In a non-limiting example, self-assembled Cas9/ArgNP nanoassemblies are prepared as described in Mout et al. (2017) ACS Nano, doi:10.1021/acsnano.6b07600 or alternatively as described in International Patent Application Publication WO2016/123514, by mixing a Cas9 from Streptococcus pyogenes modified at the N-terminus with a polyglutamate peptide that includes at least 15 glutamate residues and modified at the C-terminus with a nuclear localization signal (NLS) with cationic arginine gold nanoparticles (ArgNPs). The Cas9/ArgNP nanoassemblies are delivered to maize protoplasts prepared as described in Example 1, and to protoplasts prepared from the Black Mexican Sweet (BMS) maize cell line. In one variation of the procedure, the Cas9/ArgNP nanoassemblies are co-delivered with at least one guide RNA (such as those described in Examples 3-7) to the protoplasts. In other variations of the procedure, the self-assembled Cas9/ArgNP nanoassemblies are prepared with at least one guide RNA to allow the modified Cas9 to form a ribonucleoprotein (RNP) either prior to or after formation of the nanoassemblies; the self-assembled RNP/ArgNP nanoassemblies are then delivered to the protoplasts. Efficiency of editing is assessed by any suitable method such as a heteroduplex cleavage assay or by sequencing, as described elsewhere in this disclosure.

[0501] In a non-limiting example, self-assembled Cas9/ArgNP nanoassemblies are prepared as described in Mout et al. (2017) ACS Nano, doi:10.1021/acsnano.6b07600 or alternatively as described in International Patent Application Publication WO2016/123514, by mixing a Cas9 from Streptococcus pyogenes modified at the N-terminus with a polyglutamate peptide that includes at least 15 glutamate residues and modified at the C-terminus with a nuclear localization signal (NLS) with cationic arginine gold nanoparticles (ArgNPs). The Cas9/ArgNP nanoassemblies are co-incubated with plant cells in suspension culture. In one variation of the procedure, the Cas9/ArgNP nanoassemblies are co-delivered with at least one guide RNA (such as those described in Examples 3-7) to the plant cells in suspension culture. In other variations of the procedure, the self-assembled Cas9/ArgNP nanoassemblies are prepared with at least one guide RNA to allow the modified Cas9 to form a ribonucleoprotein (RNP) either prior to or after formation of the nanoassemblies; the self-assembled RNP/ArgNP nanoassemblies are then delivered to the plant cells in suspension culture. Efficiency of editing is assessed by any suitable method such as a heteroduplex cleavage assay or by sequencing, as described elsewhere in this disclosure.

[0502] In a non-limiting example, self-assembled Cas9/ArgNP nanoassemblies are prepared as described in Mout et al. (2017) ACS Nano, doi:10.1021/acsnano.6b07600 or alternatively as described in International Patent Application Publication WO2016/123514, by mixing a Cas9 from Streptococcus pyogenes modified at the N-terminus with a polyglutamate peptide that includes at least 15 glutamate residues and modified at the C-terminus with a nuclear localization signal (NLS) with cationic arginine gold nanoparticles (ArgNPs). The Cas9/ArgNP nanoassemblies are further prepared for Biolistics or particle bombardment and thus delivered to plant cells from suspension cultures transferred to semi-solid or solid media, as well as to rice embryogenic callus. In one variation of the procedure, the Cas9/ArgNP nanoassemblies are co-delivered with at least one guide RNA (such as those described in Examples 3-7) to the plant cells or callus. In other variations of the procedure, the self-assembled Cas9/ArgNP nanoassemblies are prepared with at least one guide RNA to allow the modified Cas9 to form a ribonucleoprotein (RNP) either prior to or after formation of the nanoassemblies; the self-assembled RNP/ArgNP nanoassemblies are then delivered to the plant cells or callus. Efficiency of editing is assessed by any suitable method such as a heteroduplex cleavage assay or by sequencing, as described elsewhere in this disclosure.

[0503] In a non-limiting example, self-assembled Cas9/ArgNP nanoassemblies are prepared as described in Mout et al. (2017) ACS Nano, doi:10.1021/acsnano.6b07600 or alternatively as described in International Patent Application Publication WO2016/123514, by mixing a Cas9 from Streptococcus pyogenes modified at the N-terminus with a polyglutamate peptide that includes at least 15 glutamate residues and modified at the C-terminus with a nuclear localization signal (NLS) with cationic arginine gold nanoparticles (ArgNPs). The Cas9/ArgNP nanoassemblies are delivered by infiltration (e. g., using mild positive pressure or negative pressure) into leaves of Arabidopsis thaliana plants. In one variation of the procedure, the Cas9/ArgNP nanoassemblies are co-delivered with at least one guide RNA (such as those described in Examples 3-7) to the Arabidopsis leaves. In other variations of the procedure, the self-assembled Cas9/ArgNP nanoassemblies are prepared with at least one guide RNA to allow the modified Cas9 to form a ribonucleoprotein (RNP) either prior to or after formation of the nanoassemblies; the self-assembled RNP/ArgNP nanoassemblies are then delivered to the Arabidopsis leaves. Efficiency of editing is assessed by any suitable method such as a heteroduplex cleavage assay or by sequencing, as described elsewhere in this disclosure.

[0504] One of skill in the art would recognize that alternatives to the above compositions and procedures can be used to edit plant cells and intact plants, tissues, seeds, and callus. In embodiments, nanoassemblies are made using other sequence-specific nucleases (e. g., zinc-finger nucleases (ZFNs), transcription activator-like effector nucleases (TAL-effector nucleases or TALENs), Argonaute proteins, or a meganuclease or engineered meganuclease) which can be similarly charge-modified. In embodiments, nanoassemblies are made using other nanoparticles (e. g., nanoparticles made of materials such as carbon, silicon, silicon carbide, gold, tungsten, polymers, ceramics, iron oxide, or cobalt ferrite) which can be similarly charge-modified in order to form non-covalent complexes with the charge-modified sequence-specific nuclease. Similar nanoassemblies including other polypeptides (e. g., phosphatases, hydrolases, oxidoreductases, transferases, lyases, recombinases, polymerases, ligases, and isomerases) or polynucleotides or a combination of polypeptides and polynucleotides are made using similar charge modification methods to enable non-covalent complexation with charge-modified nanoparticles. For example, similar nanoassemblies are made by complexing charge-modified nanoparticles with one or more polypeptides or ribonucleoproteins including at least one functional domain selected from the group consisting of: transposase domains, integrase domains, recombinase domains, resolvase domains, invertase domains, protease domains, DNA methyltransferase domains, DNA hydroxylmethylase domains, DNA demethylase domains, histone acetylase domains, histone deacetylase domains, nuclease domains, repressor domains, activator domains, nuclear-localization signal domains, transcription-regulatory protein (or transcription complex recruiting) domains, cellular uptake activity associated domains, nucleic acid binding domains, antibody presentation domains, histone modifying enzymes, recruiter of histone modifying enzymes, inhibitor of histone modifying enzymes, histone methyltransferases, histone demethylases, histone kinases, histone phosphatases, histone ribosylases, histone deribosylases, histone ubiquitinases, histone deubiquitinases, histone biotinases, and histone tail proteases.

### Example 33

[0505] This example illustrates a method of simultaneously effecting multiple modifications in a genome (i. e., multiple modifications of at least one sequence of interest in a genome), comprising introducing at least two DSBs into a genome by one or more nucleases, and, optionally, integrating at least one sequence encoded by a polynucleotide (such as a double-stranded DNA, a single-stranded DNA, a single-stranded DNA/RNA hybrid, or a double-stranded DNA/RNA hybrid) molecule at one or more DSBs. In embodiments, the modifications are effected in two or more sequences or genes of interest. More specifically, this non-limiting example illustrates using multiple different ribonucleoproteins (RNPs), wherein each RNP includes a guide RNA (gRNA) and a nuclease, to effect multiple DSBs in the genome of a monocot plant, and integration of a sequence encoded by a double-stranded DNA (dsDNA) donor molecule at the location of the multiple DSBs. In this example, two endogenous maize (Zea mays) sequences or genes of interest, Lc (see Examples 5, 6, 8, and 9) and ADH1 (see Example 3), were selected for modification by insertion of an expression-enhancing element at a DSB located in the promoter region of each gene.

[0506] The target genes selected for editing were the maize (Zea mays) alcohol dehydrogenase ADH1 (see www[dot]maizegdb[dot]org/gene_center/gene/GRMZM2G442658) with the partial genomic sequence of SEQ ID NO:21 (see Example 3), and the maize (Zea mays) Lc gene (see www[dot]maizegdb[dot]org/gene_center/gene/GRMZM5G822829) with the partial promoter sequence of SEQ ID NO:305 (see Example 5).

[0507] Ribonucleoproteins (RNPs) were prepared with Cas9 nuclease (Aldevron, Fargo, ND) and guide RNA complexes. Two guide RNA complexes were made with a crRNA and a tracrRNA (crRNAs and tracrRNA were purchased from Integrated DNA Technologies, Coralville, IA); the first guide RNA complex used a crRNA (ZmADH1-B) having the sequence of SEQ ID NO:23 (see Example 3) and the second guide RNA complex used a crRNA (ZmLc-Pro3) having the sequence of SEQ ID NO:334 (see Example 6). An expression-enhancing element in the form of the 34 base-pair dsDNA molecule “3×DR5” (with strands having the sequences of SEQ ID NO:306 and SEQ ID NO:307), which contains three copies of an auxin response element (SEQ ID NO:308), as described in Example 5, was purchased from Integrated DNA Technologies, Coralville, IA; each strand was phosphorylated on the 5′ end and contained two phosphorothioate linkages at each terminus (i. e., the two linkages between the most distal three bases on either end of the strand).

[0508] Maize B73 protoplasts were prepared as described in, e. g., Examples 1, 3, 4, 5, 6, 9, and 10. Following the same general procedures described above (e. g., Examples 3-6, 9-10, and 13-16), the protoplasts were transfected with the RNPs (including the guide RNA complexes), with or without the dsDNA molecule “3×DR5”. Transfections were carried out to deliver the same molar quantity of RNP for each genomic locus targeted for modification. Samples transfected with both the RNP containing the ZmADH1-B guide RNA complex and the RNP containing the ZmLc-Pro3 guide complex were thus transfected with twice the amount of nuclease (provided as RNP) as the samples that were transfected with only a single RNP (containing either the ZmADH1-B guide RNA complex or the ZmLc-Pro3 guide complex). Maize protoplasts treated with no nuclease, no guide RNA complex, and no dsDNA served as a null control. The transformed protoplasts were then incubated for about 48 hours in a maize incubation buffer including the herbicide 2, 4-dichlorophenoxyacetic acid (“2,4-D”), which has auxin-like properties. Next-generation sequencing (NGS) analysis was used for quantitation of editing efficiency and efficiency of integration of the “3×DR5” sequence into the maize genome. Results are provided in Table 21. Editing efficiency is expressed as the percentage of the total population of cells in which a DSB is correctly induced in the genome, i. e., wherein the DSB is correctly effected at the locus targeted by the crRNA. Insertion efficiency is expressed as the percentage of the total population of cells in which the “3×DR5” sequence is inserted at the correct locus in the genome, i. e., inserted at the locus targeted by the crRNA. Based on the NGS sequencing results, editing efficiency was nearly 60% (i. e., nearly 60% of the total cell population subjected to the editing treatment) for either of the RNPs used, whether or not the polynucleotide donor molecule was provided. Insertion efficiency was about 21% of the total cell population treated with the single ADH1-B RNP and the “3×DR5” donor (i. e., about 37% of the cells that contained a DSB at the correct locus also contained the “3×DR5” sequence), and about 25% of the total cell population treated with the single Lc-Pro3 RNP and the “3×DR5” donor (i. e., about 44% of the cells that contained a DSB at the correct locus also contained the “3×DR5” sequence). In the case of cells treated with both RNPs and the “3×DR5” donor, insertion efficiency was about 27% at the ADH1 locus and about 29% at the Lc locus. These data demonstrate a consistent over-all editing efficiency of approximately 60% of the total cell population and a consistent over-all insertion efficiency of approximately 25% of the total cell population (which is equivalent to approximately 40% of the cells that contained a DSB at the correct locus). The data indicate that simultaneous multiple modifications (integration of a dsDNA at a DSB in two different genes) in the maize protoplasts' genome was effected at about the same efficiency as a modification in one of the genes individually, as the editing and insertion efficiencies were approximately the same as those observed for modification carried out in an individual gene.

TABLE 21

| | | ADH1 | | | Lc | | |
|---|---|---|---|---|---|---|---|
| Treatment | | | | DSB | | | DSB |
| | Polynucleotide | | | with | | | with |
| | donor | Editing | Insertion | 3xDR5 | Editing | Insertion | 3xDR5 |
| RNP | molecule | efficiency | efficiency | insertion | efficiency | efficiency | insertion |
| Null | none | 0 | 0 | 0 | 0 | 0 | 0 |
| ADH1-B | 3xDR5 | 57.17 | 20.94 | 36.6% | 0 | 0 | 0 |
| Lc-Pro3 | 3xDR5 | 0 | 0 | 0 | 59.74 | 24.83 | 41.6% |
| ADH1- | none | 55.83 | 0 | 0 | 65.24 | 0 | 0 |
| B + Lc- | | | | | | | |
| Pro3 | | | | | | | |
| ADH1- | 3xDR5 | 61.58 | 27.13 | 44.1% | 67.73 | 29.31 | 43.3% |
| B + Lc- | | | | | | | |
| Pro3 | | | | | | | |

[0509] One of skill in the art would recognize that simultaneously effecting multiple DSBs in a genome (e. g., effecting multiple DSBs in a sequence of interest or effecting at least one DSB in each of two or more sequences of interest) can be achieved with alternative methods (e. g., use of CRISPR nucleases other than Cas9, such as a Cpf1 (Cas12a) nuclease, a CasY (Cas12d) nuclease, a CasX (Cas12e) nuclease, a C2c1 nuclease, a C2c3 nuclease, a Cas12f nuclease, a Cas12i_nuclease, a Cas12j_nuclease, zinc-finger nucleases (ZFNs), transcription activator-like effector nucleases (TAL-effector nucleases or TALENs), Argonaute proteins, or a meganuclease or engineered meganuclease) and thus similar embodiments of the approach described herein include use of any of these methods for simultaneously effecting multiple DSBs in a genome, and, optionally, integrating a sequence encoded by at least one polynucleotide molecule at one or more DSBs.

### Example 34

[0510] As described herein, microinjection techniques can be used as an alternative to the methods for delivering targeting agents to protoplasts as described, e.g., in certain Examples above. Microinjection is typically used to target specific cells in isolated embryo sacs or the shoot apical meristem. See, e.g., U.S. Pat. No. 6,300,543, incorporated by reference herein. For example, an injector attached to a Narashige manipulator on a dissecting microscope is adequate because the cells to be microinjected are relatively large (e.g., the egg/synergids/zygote and the central cell). For smaller cells, such as those of the embryo, a compound, inverted microscope with an attached Narashige manipulator is used. Injection pipette diameter and bevel are also important. Use a high quality pipette puller and beveler to prepare needles with adequate strength, flexibility and pore diameter. These will vary depending on the cargo being delivered to cells. The volume of fluid to be microinjected must be exceedingly small and must be carefully controlled. An Eppendorf Transjector yields consistent results (Laurie et al., 1999).

[0511] The genetic cargo can be RNA, DNA, protein or a combination thereof. The cargo can be designed to change one aspect of the target genome or many. The concentration of each cargo component will vary depending on the nature of the manipulation. Typical cargo volumes can vary from 2-20 nanoliters. After microinjection the embryos are maintained on sterile MS medium with 10% sucrose. Plantlets are transferred to fresh MS media every two weeks and to larger containers as they grow. Plantlets with a well-developed root system are transferred to soil and maintained in high-humidity for 5 days to acclimate. Plants are gradually exposed to the air and cultivated to reproductive maturity.

[0512] Microinjection of corn embryos: The cobs and tassels are immediately bagged when they appear to prevent pollination. To obtain zygote-containing maize embryo sacs, hand pollination of silks is performed when the silks are 6-10 cm long, the pollinated ears are bagged and tassels removed, and then ears are harvested at 16 hours later. After removing husks and silks, the cobs are cut transversely into 3 cm segments. The segments are surface sterilized in 70% ethanol and then rinsed in sterile distilled, deionized water. Ovaries are then removed and prepared for sectioning. The initial preparation may include mechanical removal of the ovarian wall, but this may not be required.

[0513] Once the ovaries have been removed, they are attached to a Vibratome sectioning block, an instrument designed to produce histological sections without chemical fixation or embedment. The critical attachment step is accomplished using a commercial adhesive such as Locktite cement. Normally 2-3 pairs of ovaries are attached on each sterile sectioning block with the adaxial ovarian surface facing upwards and perpendicular to the longitudinal axis of the rectangular sectioning block (Laurie et al., In Vitro Cell Dev Biol., 35: 320-325, 1999). Ovarian sections (or “nucellar slabs”) are obtained at a thickness of 200 to 400 micrometers. Ideal section thickness is 200 micrometers. The embryo sac will remain viable if it is not cut. The sections are collected with fine forceps and evaluated on a dissecting microscope with basal illumination. Sections with an intact embryo sac are placed on semi-solid Murashige-Skoog (MS) culture medium (Campenot et al., 1992) containing 15% sucrose and 0.1 mg/L benzylaminopurine. Sterile Petriplates containing semi-solid MS medium and nucellar slabs are then placed in an incubator maintained at 26° C. These can be monitored visually by removing plates from the incubator and examining the nucellar slabs with a dissecting microscope in a laminar flow hood.

### Example 35

[0514] This example illustrates a method of providing a plant cell or plant having a modified phenotype, the method including generating novel alleles by deletion of genome sequences between at least two double-strand breaks (DSBs). In this non-limiting example, multiple DSBs are effected in a maize cell by using multiple ribonucleoproteins (RNPs), each including a nuclease and a guide RNA (gRNA). More specifically, this example illustrates deletion of a microRNA (miRNA) recognition site in a maize gene containing an SPX domain and predicted to be natively regulated at least in part by an endogenous miRNA, thereby decoupling the gene from regulation by the endogenous miRNA. Maize plants containing such a genomic modification are predicted to have increased nitrogen use efficiency, especially under conditions of nitrogen deficiency, compared to plants lacking the genetic modification.

[0515] Proteins containing an SPX (“SYG1/Pho81/XPR1”) domain have been assigned the protein family identifier Pfam PF03105; see, e. g., pfam[dot]xfam[dot]org/family/SPX. Some SPX proteins are reported to be involved in phosphate uptake/regulation; see, e. g., Wang et al. (2004) Plant Physiol., 135:400-411. More recently, novel maize SPX proteins were reported to contain a miRNA recognition site for a mature miRNA identified from at least Oryza sativa, Zea mays, and Glycine max, with the sequence UUAGAUGACCAUCAGCAAACA (SEQ ID NO:997); this miRNA is similar to miR827 reported from Arabidopsis thaliana. In maize, expression of this mature miRNA was reported to be strongly suppressed under nitrogen deficiency relative to expression under nitrogen sufficiency as well as suppressed under phosphate deficiency relative to expression under phosphate sufficiency (see especially FIG. 12 and Examples 7-15 in U.S. Pat. No. 8,946,511, which is incorporated in its entirety by reference herein). Consonant with this, maize and Arabidopsis genes containing an SPX domain (the SPX and SPX-MFS domain clades shown in FIG. 12 of U.S. Pat. No. 8,946,511) were reported to be suppressed under nitrogen sufficiency, indicating probable regulation by the miRNA with the sequence UUAGAUGACCAUCAGCAAACA (SEQ ID NO:997).

[0516] Maize protoplasts are prepared as described in Example 1. Preparation of reagents, gene editing procedures, and detection of gene modifications are carried out using procedures similar to those described in Examples 13-16. The maize gene selected for modification is GRMZM2G086430 (see Thatcher et al. (2014) Plant Cell, 26:3472-3487; see also SEQ ID NO:8767 in U.S. Pat. No. 8,946,511, which is incorporated in its entirety by reference herein); a partial 5′ untranslated region (5′ UTR) sequence of this gene is:

(SEQ ID NO: 998)
AGCAGCACGGCAGTAGCTGCGCCATTGCACGCCTCCGGCCGGCGGCTG
CTTGTCTTGCTGCTTCTGCCGCACATCCGTGATCCgtacgtcgtcacc
tcaccactcacgcacaagcacaaagagcgttaatttcttgctggagat
tctattctatttctatggcgtgtccctgatcgaatcctaaatcctaaa
cctctgtggtgcactgcagGGCAGAAGGTGCTTCGTTCGTTGCAGGCC
TGGCGCCACGCCGTACCGTGCAAGCGCGTTTGCTGATGTTCATCTAAT
TACTGTATAATAATATCTCCGGGCGAAAGAGCTAGCAATCGTCGGCGG
GGGAGGAGGGGCTCGATTGCTGCTCAAGGTGAGTTGTAATTCCTTGGC
TCTGGATTTCCCTATCTGTTGGCTGTTCATGGATCATCCAATGGATGG
ATGGCGCTCCCTGTTCTCTACACCTGCGTGCTCTTCTTCCCTCGCCTC
GCCGGGGTCTTGTGTCAGTT,

with intronic sequence shown in lower-case font and the miRNA recognition site CGTTTGCTGATGTTCATCTAA (SEQ ID NO:999) located at nucleotide positions 267-287 of SEQ ID NO:998 shown in underlined font. Two crRNAs are designed to effect DSBs on either side of the miRNA recognition site, resulting in a 66 base-pair deletion in the genomic sequence; the first crRNA (CAUCAGCAAACGCGCUUGCAGUUUUAGAGCUAUGCU, SEQ ID NO:1000) was designed to effect a DSB at 262 base-pairs downstream of (5′ to) the transcription start site (TSS) and the second crRNA (GCGAAAGAGCUAGCAAUCGUGUUUUAGAGCUAUGCU, SEQ ID NO:1001) was designed to effect a DSB at 328 base-pairs downstream of (5′ to) the TSS. The crRNAs and tracrRNA are purchased from Integrated DNA Technologies, Coralville, IA. Ribonucleoprotein (RNP) complexes are prepared using gRNA (crRNA:tracrRNA) complexes and Cas9 nuclease (Aldevron, Fargo, ND). The two RNPs are delivered together to the maize protoplasts using procedures similar to those described in Examples 13-16. The resulting partial sequence deletion in non-coding sequence of the SPX gene is expected to decouple the gene's expression from endogenous miRNA regulation, i. e., deregulating SPX expression in response to nitrate sufficient or phosphate sufficient conditions. Similar genomic modification is carried out in maize germline cells using procedures as described in Examples 31-34; the resulting maize plants containing such a genomic modification (decoupling of SPX expression from miRNA regulation) are predicted to have increased nitrogen use efficiency, especially under conditions of nitrogen deficiency.

[0517] Transcript levels of SPX is measured by quantitative PCR in the genomically modified protoplasts and in control protoplasts lacking the genomic modification, grown under high nitrate (10 millimolar KNO₃) or high phosphate (10 milligrams/liter). To evaluate effects of a similar genomic modification (deletion of the functional miRNA recognition site in the SPX gene) in whole maize plants or seedlings, the plants or seedlings are grown under high (10 millimolar) nitrogen, low nitrogen (0.1 millimolar), high phosphate (10 milligrams/liter), or low phosphate (0.1 milligrams/liter) conditions and biomass is measured. Plants or seedlings in which the SPX gene is modified to decouple its expression from endogenous miRNA regulation are predicted to have increased biomass, especially under conditions of nitrogen deficiency, relative to control plants lacking the genomic modification.

### Example 36

[0518] This example illustrates a method of providing a plant cell or plant having a modified phenotype, the method including generating alleles having modified epigenetic (i. e., methylation) status. The miniature inverted-repeat transposable element (MITE) insertion found in the promoter region of ZmNAC111 appears to have occurred after maize domestication and spread among temperate germplasm; it is associated with natural variation in maize drought tolerance. Increasing ZmNAC111 expression in transgenic maize enhances drought tolerance at the seedling stage, improves water-use efficiency and induces upregulation of drought-responsive genes under water stress. See, e. g., Mao et al. (2015) Nature Communications, DOI: 10.1038/ncomms9326. In this non-limiting example, the MITE insertion in the 5′ untranslated region (5′ UTR) of the maize NAC111 gene is modified in order to increase ZmNAC111 expression and thereby improve water use efficiency in the maize cell or plant.

[0519] The gene to be modified is the maize NAC111 gene (GRMZM2G127379; see Mao et al. (2015) Nature Communications, DOI: 10.1038/ncomms9326), which has a promoter sequence (i. e., the 600 contiguous nucleotides located immediately upstream of the NAC111 transcription start site) given by: ttctccataaaaaaagttgagctaaacagcccctaaagtatatgtagataagcacgattetagtactaaccgcaggacttettgagcagagcaaaagatgg aTACTCCCTCCGTTTCTTTTTATTAGTCGCTGGATAGTGCAATTTTGCACTATCCAGCGACTA ATAAAAAGAAACGGAGGGAGTAttaattacagaagaactgacggggcgcatggtttccacgaggtgggcgcaccccggccaca tgcatcggcgaaaacaaaatggcagtcgcgaatcgaaagctgccaagctaggccgcatgctggggatgtgtgacacacatatcattggcggtcatggc aggtcgacacgtgtaggeggacgtcatccategtettcatecctatetatetatetatcactcagtacaagccattgetttcgttatettccgaggegggcag ggcagggcaggttcttccccccttggcacgcaccgcacgcacggcttgcgtggagccaggccagctcgacgatgactacgcggccccggccccgc ggcccagtcctccctcctcttcgatcctataaaagcgaggcccagtccctccatctc (SEQ ID NO:1002), with the MITE sequence located at nucleotide positions 103-186 of SEQ ID NO:1002 (i. e., 414-498 base-pairs upstream of the NAC111 transcription start site) and indicated by upper case font.

[0520] In one approach, the MITE sequence is deleted or made non-functional by effecting at least one DSB in the MITE sequence. Two crRNAs are designed to effect DSBs on either side of the MITE sequence, resulting in deletion of the MITE sequence; the first crRNA (GCUCUGCUCAAGAAGUCCUGGUUUUAGAGCUAUGCU, SEQ ID NO:1003) was designed to effect a DSB 525 base-pairs upstream of the transcription start site (TSS) and the second crRNA (UAAUUACAGAAGAACUGACGGUUUUAGAGCUAUGCU, SEQ ID NO:1004) was designed to effect a DSB at 396 base-pairs upstream of the TSS. The crRNAs and tracrRNA are purchased from Integrated DNA Technologies, Coralville, IA. Ribonucleoprotein (RNP) complexes are prepared using gRNA (crRNA:tracrRNA) complexes and Cas9 nuclease (Aldevron, Fargo, ND). The two RNPs are delivered together to the maize protoplasts using procedures similar to those described in Examples 13-16. The resulting partial sequence deletion in non-coding sequence of the ZmNAC111 gene is expected to result in upregulation of ZmNAC111 expression. Similar genomic modification is carried out in maize germline cells using procedures as described in Examples 31-34; the resulting maize plants containing such a genomic modification (deletion of the MITE sequence) are predicted to have increased water use efficiency (measured, e. g., by comparison of biomass or of seed yield of plants grown under different water availability regimes) and therefore enhanced drought tolerance.

[0521] In another approach, the MITE sequence is modified by targeted demethylation, e. g., using guide RNAs and a catalytically deactivated Cas9 (“dCas9”) fused to the demethylation enzyme TET1 (a 5-methylcytosine hydroxylase). Constructs encoding a modified dCas9-SunTag and an anti-GCN4 scFv fused to ten-eleven hydroxylase 1 (TET1), as described in detail by Morita et al. (2016) Nature Biotechnol., 34:1060-1065; doi: 10.1038/nbt.3658), are used to demethylate the ZmNAC111 MITE region; these plasmids are publicly available from Addgene (see www[dot]addgene[dot]org/browse/article/22324/). Two crRNAs targeting the MITE region in the promoter of ZmNAC111 were designed to bring TET1 to MITE region and trigger demethylation; the first crRNA (GCUCUGCUCAAGAAGUCCUGGUUUUAGAGCUAUGCU, SEQ ID NO:1003) was designed to target 508-528 base-pairs upstream of the transcription start site (TSS) and the second crRNA (CAGCGACUAAUAAAAAGAAAGUUUUAGAGCUAUGCU, SEQ ID NO:1005) was designed to target 425-445 base-pairs upstream of the TSS. The crRNAs and tracrRNA are purchased from Integrated DNA Technologies, Coralville, IA. Ribonucleoprotein (RNP) complexes are prepared using gRNA (crRNA:tracrRNA) complexes and Cas9 nuclease (Aldevron, Fargo, ND). The two RNPs are delivered together with the dCas9-SunTag and anti-GCN4 scFv/TET1 fusion plasmids to the maize protoplasts using procedures similar to those described in Examples 13-16. The resulting demethylation of the MITE region of the ZmNAC111 gene is expected to result in upregulation of ZmNAC111 expression. Similar genomic modification is carried out in maize germline cells using procedures as described in Examples 31-34; the resulting maize plants containing such a genomic modification (demethylation of the MITE sequence) are predicted to have increased water use efficiency (measured, e. g., by comparison of biomass or of seed yield of plants grown under different water availability regimes) and therefore enhanced drought tolerance.

### Example 37

[0522] This example illustrates a method of providing a plant cell or plant having a modified phenotype, the method including generating novel alleles having a modified amino acid sequence. In this non-limiting example, homology-dependent repair (HDR) is employed to effect amino acid changes in genomic sequence of an abscisic acid (ABA) receptor in maize, ZmPYL-E, that render the modified ZmPYL-E hypersensitive to ABA. See, e. g., U. S. Patent Application Publication 2016/0194653, which is incorporated by reference in its entirety herein. Maize cells and plants containing such a genomic modification are predicted to show hypersensitivity to ABA and increased water use efficiency compared to plants lacking the genetic modification.

[0523] The HDR approach described here uses the novel approach of delivering the HDR template as a component of the Cas9/gRNA complex directly to double-strand breaks (DSBs) precisely effected in the genome of cells. In embodiments, the HDR template/Cas9/gRNA complex is delivered to germline cells (or cells that give rise to germline cells), avoiding the need for tissue culture and resulting in the intended genome modification being heritable to subsequent generations of plants.

[0524] The target gene is ZmPYL-E; genomic sequence for this gene is given by: atggtgggtctcgtcggcggcagcacggcgcgggcggagcacgtcgtcgccaacgccggaggggaggcagagtacgtgcgccgcatgcaccgcc acgcgccgaccgagcaccagtgcacctccaccctcgtcaagcacatcaaggcgcccgtccacctcgtatgtcccccctccaccccgctctttcctaccc teaacgeggetggccccggtggttcageggttggactgcctogegtetgggetgetatttetetteggatetggagtcaggagtecttcgtecgatttccaa ggccttgttgggtgtctcccccccaccgacgtgttctcgtgatgttgggttaatcgcggctggcgtcaaatcgattggaagctgacgccgtcgatcgcatc gcaggtgtgggagctggtgcggaggttcgaccagccgcagcggtacaagccgttcgtcaggaactgcgtcgtgcgcggggaccagctcgaggtcg gcagcctgcgcgacgtcaacgtcaagaccggcctgccggcgacgaccagcaccgagcgcctcgagcagctcgacgacgacctgcacatactcggt gtcaagttcgtcggcggggaccaccgcctccaggtccgtgctgctgccgcccgtttgttgcgtccctgcaaaaatgctctgtttcacgcgccctccttgctt gtcagtgtactccaaatttttgggggtatgcttgtttgttactctttetettttttttaaattaaatctgtttccatttcactgcagtectgggagcggg tgctatgcatgaaatgcatttctgtgttgcgagttgggcatttactatgagtttgtgacagttaacatcttggtectgtttggaagetgggattgggaatc aaatccttacatggtttaggagcatccagtttgaagttaaaccattgtagacatetgecatactaattggttggtgagaggcactcatcatcagtt caaaettaaaacgagataagccateggttgattggcctaattacettgettcccgtgattgttegcctogetgaaaggatatgetcacaacccgtactgttttg acttgttatccacatactatttaagtacgaaaggacatgcgtactactttcatttgttgttcttcgtetagtettcagactgataatataaggtgaaaaactte gat gtttegegtgetgtcaagtgattgtgaagcaaagtttetgttagtgtcaatgcgtacaggetgcaatggccatetttactcetacttgaagcatatetetgatcc acactgatgatgatgagttgtgtgegccacttttttttetttttetttcagaactactcatccatcataaetgtecaccccgagagcattgacgggaggceggg caccetggtgategagtcgttegtggtcgatgtgcctgatggcaacacgaaggacgagacatgetacttcgtggaggcegtgatcaagtgcaacctcaa ttetctegcagaggtatcggagcagctagcagtgagtcacetacgtecgetgatcgatcagtga (SEQ ID NO: 10061 and a cDNA sequence is given by: ATGGTGGGTCTCGTCGGCGGCAGCACGGCGCGGGCGGAGCACGTCGTCGCCAACGCCGGAG GGGAGGCAGAGTACGTGCGCCGCATGCACCGCCACGCGCCGACCGAGCACCAGTGCACCTC CACCCTCGTCAAGCACATCAAGGCGCCCGTCCACCTCGTGTGGGAGCTGGTGCGGAGGTTC GACCAGCCGCAGCGGTACAAGCCGTTCGTCAGGAACTGCGTCGTGCGCGGGGACCAGCTCG AGGTCGGCAGCCTGCGCGACGTCAACGTCAAGACCGGCCTGCCGGCGACGACCAGCACCGA GCGCCTCGAGCAGCTCGACGACGACCTGCACATACTCGGTGTCAAGTTCGTCGGCGGGGAC CACCGCCTCCAGAACTACTCATCCATCATAACTGTCCACCCCGAGAGCATTGACGGGAGGCC GGGCACCCTGGTGATCGAGTCGTTCGTGGTCGATGTGCCTGATGGCAACACGAAGGACGAG ACATGCTACTTCGTGGAGGCCGTGATCAAGTGCAACCTCAATTCTCTCGCAGAGGTATCGGA GCAGCTAGCAGTGGAGTCACCTACGTCGCTGATCGATCAGTGA (SEQ ID NO:1007), which encodes the native amino acid sequence MVGLVGGSTARAEHVVANAGGEAEYVRRMHRHAPTEHQCTSTLVKHIKAPVHLVWELVRRFD QPQRYKPFVRNCVVRGDQLEVGSLRDVNVKTGLPATTSTERLEQLDDDLHILGVKFVGGDHRL QNYSSIITVHPESIDGRPGTLVIESFVVDVPDGNTKDETCYFVEAVIKCNLNSLAEVSEQLAVESPT SLIDQ (SEQ ID NO:1008); the three nucleotides (GAG) encoding the glutamic acid residue at position 149 in the polypeptide is indicated by underlined font in the cDNA sequence.

[0525] In one approach, a ABA-hypersensitive ZmPLY-E allele is designed to have an amino acid change of E149L, i. e., glutamic acid (E) to leucine (L) at position 149 in the ZmPyl-E polypeptide. A non-limiting embodiment includes changing the codon encoding the amino acid at position 149 from GAG to CTG. A cDNA encoding the hypersensitive ZmPYL-E allele with the E149L mutation has the sequence ATGGTGGGTCTCGTCGGCGGCAGCACGGCGCGGGCGGAGCACGTCGTCGCCAACGCCGGAG GGGAGGCAGAGTACGTGCGCCGCATGCACCGCCACGCGCCGACCGAGCACCAGTGCACCTC CACCCTCGTCAAGCACATCAAGGCGCCCGTCCACCTCGTGTGGGAGCTGGTGCGGAGGTTC GACCAGCCGCAGCGGTACAAGCCGTTCGTCAGGAACTGCGTCGTGCGCGGGGACCAGCTCG AGGTCGGCAGCCTGCGCGACGTCAACGTCAAGACCGGCCTGCCGGCGACGACCAGCACCGA GCGCCTCGAGCAGCTCGACGACGACCTGCACATACTCGGTGTCAAGTTCGTCGGCGGGGAC CACCGCCTCCAGAACTACTCATCCATCATAACTGTCCACCCCGAGAGCATTGACGGGAGGCC GGGCACCCTGGTGATCCTGTCGTTCGTCGTCGATGTGCCTGATGGCAACACGAAGGACGAG ACATGCTACTTCGTGGAGGCCGTGATCAAGTGCAACCTCAATTCTCTCGCAGAGGTATCGGA GCAGCTAGCAGTGGAGTCACCTACGTCGCTGATCGATCAGTGA (SEQ ID NO:1009). A single-guide RNA (sgRNA) including the sequence of CCUGGUGAUCGAGUCGUUCG (SEQ ID NO:1010) is designed to effect a double-strand break (DSB) close to the nucleotides encoding the codon at position 149; the complete sgRNA sequence is given by

(SEQ ID NO: 1011)
CCUGGUGAUCGAGUCGUUCGguuuuagagcuagaaauagcaaguuaa
aauaaggcuaguccguuaucaacuugaaaaaguggcaccgagucggu
gcuuuuuuGUCGACGGUAUCGAUAAGCUUGAUAUCGAAUUC,

which includes a 33-nucleotide RNA extension (indicated by underlined upper-case font and having the sequence GUCGACGGUAUCGAUAAGCUUGAUAUCGAAUUC (SEQ ID NO:1012)) to the 3′ end of the sgRNA that acts as a tether to non-covalently link the Cas9/sgRNA complex by RNA:DNA duplex formation with a DNA donor molecule with homology arms that acts as an HDR template for editing the ZmPyl-E gene to effect the E149L amino acid change. This HDR template has the sequence

(SEQ ID NO: 1013)
GACGGGAGGCCGGGCACCCTGGTGATCCTGTCGTTCGTCGTCGATGT
GCCTGATGGCAACACGAAGGAATTCGATATCAAGCTTATCGATACCG
TCGAC

which includes a 33-nucleotide DNA extension (indicated by underlined upper-case font and having the sequence GAATTCGATATCAAGCTTATCGATACCGTCGAC (SEQ ID NO:1014)), which is complementary to and will bind with the tether extension on the sgRNA. The HDR template encodes the E149L codon substitution and in addition encodes a mutation in the valine 152 codon which destroys the PAM site and prevents further cleavage by Cas9.

[0526] In various embodiments, tether sequences are used to complex NHEJ or HDR polynucleotide donor molecules to a RNA-guided nuclease (e. g., a type II Cas nuclease, a Cas9, a type V Cas nuclease, a Cpf1 (Cas12a) nuclease, a CasY (Cas12d) nuclease, a CasX (Cas12e) nuclease, a C2c1 nuclease, a C2c3 nuclease, a Cas12f nuclease, a Cas12i nuclease, or a Cas12j nuclease). Embodiments of polynucleotide donor molecules include single- or double-stranded RNA or DNA or RNA/DNA hybrids, which can be up to several thousand nucleotides in length and include a tether complementary sequence. To assemble the complex, equal-molar amounts of sgRNA and polynucleotide donor molecule are mixed and heated to 95 degrees Celsius for 5 minutes, then removed from the heat and allowed to cool to room temperature. The appropriate amount of Cas9 is then added to sgRNA:donor complex and incubated at room temperature for 5 minutes.

[0527] In embodiments, the Cas9:sgRNA:donor complex is delivered to maize cells by microinjection (e. g., into 1-3 days-after-pollination zygotes), electroporation (e. g., into 9-12 days-after-pollination zygotes), or bombardment or Biolistics (e. g., into 9-12 days-after-pollination zygotes). Biolistic delivery of RNPs to maize embryos is carried out using procedures similar to those described by Svitashev et al. (2016) Nature Communications, doi:10.1038/ncomms13274. The microinjection approach is described in Example 34. The electroporation approach is similar to techniques useful in wheat; see, e. g., T. Hagio (2009) “Direct Gene Transfer into Plant Mature Seeds via Electroporation After Vacuum Treatment.” In: Electroporation and Sonoporation in Developmental Biology, edited by H. Nakamura, Springer, Japan, doi:10.1007/978-4-431-09427-2_25; and Klöt et al. (1993) Plant Cell Reports, 12:671-75, doi:10.1007/BF00233417. This method can be applied to excised 9-12 days-after-pollination embryos or partially germinated seed. Briefly, 20 seed are placed in germination buffer (0.2% polyvinylpyrrolidone (PVP), 0.001% active chlorine) in the dark at 10 degrees Celsius for 3 days. The seed are then transferred to electroporation buffer (0.25% polyvinylpyrrolidone (PVP), 0.15% Tween 20, 5 millimolar spermidine, 0.5% Cellulase (Onozuka RS), 0.125 molar calcium chloride dihydrate) containing the ZmPYL-E RNP complex described above. The mixture is placed under vacuum (0.9 Bar) for 3 hours at room temperature (22 degrees Celsius). The seed are then placed in a 1-1.5 centimeter electroporation cuvette with the scutellum facing the positive electrode and submerged in electroporation buffer. An electronic pulse is delivered using a BTX Gemini X2 waveform generator (square waves, 75 volts, 50 millisecond pulse duration, 10 pulses/second, 100 pulses) one to three times. The seed are returned to germination medium and cultured in the dark at 26 degrees Celsius for 48 hours. Individual seed are then processed to evaluate the presence or absence of the intended edit.

[0528] One procedure for assaying successful introduction of the ZmPYL-E hypersensitive allele is to measure the endogenous maize Rab17 (ZmRab17) transcript level. The ZmRab17 steady-state transcript level in plants possessing a hypersensitive ZmPYL-E allele is expected to be higher than that in plants lacking a hypersensitive ZmPYL-E allele; see, e. g., Buchanan et al. (2004) Genetics, 168: 1639-54. doi:10.1534/genetics.104.030346. Maize plants with a ZmPYL-E hypersensitive allele are predicted to exhibit increased water use efficiency, e. g., such plants will produce more biomass per unit water transpired when compared to plants that lack this allele; see, e. g., Medrano et al. (2015) The Crop J., 3: 220-28, doi:10.1016/j.cj.2015.04.002.

### Example 38

[0529] This example illustrates a method of providing a plant cell or plant having a modified phenotype, the method including generating novel alleles having a modified amino acid sequence. In this non-limiting example, homology-dependent repair (HDR) is employed to insert heterologous promoter sequence upstream of the transcription start site (TSS) of a cytochrome P450 gene, resulting in tissue-specific increased expression of that gene. Maize cells and plants containing such a genomic modification are predicted to show increased biomass and seed yield, in comparison to plants lacking the genomic modification.

[0530] The target gene is ZmPLA1 (PLASTOCHRON1, GRMZM2G167986), a cytochrome P450 (CYP78A1), which extends the duration of cell division. Constitutive transgenic expression of ZmPLA1 in maize using a ubiquitin promoter resulted in plants with very large leaves but which failed to reproduce; in contrast, localized transgenic expression of ZmPLA1 in maize using a maize GA2-oxidase (ZmGA2ox, GRMZM2G031724) promoter resulted in increased leaf size, increased biomass, and increased seed yield; see, e. g., Sun et al. (2017) Nature Communications, 8:14752; DOI: 10.1038/ncomms14752.

[0531] A partial genomic sequence of ZmPLA1 is provided as: attaactagtgctgataatatatttacactgtagatttttccgataagtagaaaccaaatatttcaccgccacaaaaggcttcatcccatcagttacccatgtag caaaaccaaaatacttgtgtgcgagaggccaagagcccaaaccaccgccaaggaaacccccagcccaccaggcgccttcctctataaataccctaact ccggtggccgaagttcctcACCCATTCACTCACTCATCTCAAGGCCTAGGTAGCACCGTAGCAGCTACT AGAAGCAGCTAGCCAGAACAACTCGTCC (SEQ ID NO:1015); promoter sequence is indicated by lower-case font and 5′ untranslated region (5′ UTR) indicated by upper case font.

[0532] Three crRNAs targeting this region upstream of the ZmPLA1 TSS were designed effect double-strand breaks (DSBs) upstream or slightly downstream of the TSS; the first crRNA (UGGGAUGAAGCCUUUUGUGGGUUUUAGAGCUAUGCU, SEQ ID NO:1016) was designed to effect a DSB 150 base-pairs upstream of (5′ to) the transcription start site (TSS), the second crRNA (CCAAAAUACUUGUGUGCGAGGUUUUAGAGCUAUGCU, SEQ ID NO:1017) was designed to effect a DSB 95 base-pairs upstream of the TSS, and the third crRNA (CCAAAAUACUUGUGUGCGAGGUUUUAGAGCUAUGCU, SEQ ID NO:1018) was designed to effect a DSB 19 base-pairs downstream of (3′ to) the TSS. The sequence to be inserted at a DSB was a 2,046-bp promoter sequence of the maize GA2-oxidase (Sun et al. (2017) Nature Communications, 8:14752; DOI: 10.1038/ncomms14752): GAGGATTGCAGCTCCTGGATCATATCAGAATGTCTGTCGCTCGCCACCCCGGGCGCACTGCA TTATATTTCTGGCAGGTGCGCAATACAATATGGCATGGGGGGCACGTAGTACGGTACTGCCG TACAGCTGCGTCAGCAAATGCCAACTTGTGTGGTACAGCTATAATCTATAGAAAAAAGAAT ATTATAGAAGTAGTAGAAGTTGGCGCGTATGGATTAAGGAAGGTTTGGTTTCTAGTGACTAA TTTAGTCTCTCTATTTTATTCAATTTTGTTCCTAAATTATCAAACTAAAATGAAGTTTTGTTTT TTTTATATAGGATAATTTAGAGACTAAAATAGAATAAAAATGAATGGATGAAAAATTAGTT CCTACCAACCAAACACCCCTTAAGAGCTACTTCGAGAACCTCAAATCTCCTTCGAGACTGGA GGAGATGAAGGTAAAAATAAACTAATTTTCCCTTCAATCCTTTTAATTCACAAGGGGGTGCG GGTACGGAAATGTTTACTACTATACTGGAAAGGTGTCTGAAACCGGGAGAAAAGCTTTGAC CAGGGTGGACCTGTTTATGGGATCGAAGCGGCCGTTGCCCCAACTGGCGACTGGCGAGCCA CCATTGCGCGGACCCGAGATTAACTATACTACAGGAGTACTGTCGGGTTGGTACCAATACGT GGCTTGGGCAAAAAGTCTGGCAGGCGCCGCTGCTTGTCTGCGGTTTCTATGTGCCGATGCCA TCGCACCGGACCGGATCGGGATGGGATCAGCGGAACATGCGAGAGCGAGCCTGCACTGCAC TGCATGGCCGCGACCGCGTCGTCCATCGAGCCGCCTATCATTAGTTGGTTCCACTGTCTCGC CGCCGAAGCAAGGCAGCACAGCACACATCAGCATTGCTTCCCAGTTCCCAATGCCCCGTCGT CCTAGCCGAGGCGGGCTCAGTACCAACCCAGCTGAAACTACGAGAGATGCGCTGTGGGCAG GACAGTGGTCGAGCGAGGAGTGTACCTGTAGTTAACGAGGATTTTATTTTACTAGTGCGTAC GTACGTACTGTACGTACTATGATCTCTCACGTGCTCTGGTCTTATCACTCGCTTGATTATACT ATGATCTTTTTTTCCCTCCACCTGCTCTGGTCTTATCGCTGGCACGTGCTTTTACACGGCCAC TTAGGACTACTCACCTCGTCTCGTCATGCTTATCTACTTCAGAGCGTCACGGACACAGCAAG GAGGAGTACGCACACGCAGCATGGACTGCCTGGAGCGGGGTGTGGTGCACTAACGCCCGCC TAATTCCCGGAGCTGCCTGTGCCTTGGACGCCCATCTCTGGTTTCGCGGGGAGAATAATAAT AATTTAGGCGAAACACGGGAACGGGTCGTGAGGAAAAGCCTGACATGCTGCATTACGGCCG GTGCCGTTCGGACCCCAGTTATTGATGAGCCGAGTCACCGACCTGCCAAGAAAAGGATGCC GGATCAAGGGCAGGTTCACCTCATCTTAGCGCATGCAAGCGTCGTCCCTAACCAAAACATC ATCTTCATGTCTGGCCGCCCGCGCAGCGGTCCCAGTGCCGGCGTGGTTAACGGGAGGGACT GGGACTGGCAGGGCCGGCTAATGGCCGACGTGCAGTCGCCTCGTATGCGTTTCCCGTTGAGC CATGCATGCAGCAGAGCAGCGCGGGCGGCCGGTCCTGCCACCGGTGGATCGCGGCCGGGCA CGTCACGGCCCGGTCCCCGACTGCTCTGGCTCCATCGCCGCCACCATGCACCCAAAGCGATC CACCCCCGATGCATCCCTTTTCTCTCCCTGTCAGCTGGGCCCATCTCGCGTCACCGTAGCCAG GTGCCGCCCCGTCGCCCCGCCCCCCGATCTATATATGCTGCCCACGGGCTCTCCCACTTCTCC CCCACATGCACTTGCTGCAGCAGCCGTAGGACACACGCACACCGCCTCGACCTCGAGTCCA CCACTGACTCCACCACCTCCCCCTGTTTTTTTTCGACCTCGCTCTGCTCATCCGCACGGCCAG ACAGCC (SEQ ID NO:1019). Polynucleotide (such as a double-stranded DNA, a single-stranded DNA, a single-stranded DNA/RNA hybrid, or a double-stranded DNA/RNA hybrid) donor molecules are designed including the ZmGA2ox promoter (SEQ ID NO:1019) with the addition of homology arms (generally including about 50 to about 1000 nucleotides having sufficient sequence identity or complementarity to the genomic sequence flanking the site of the DSB) on one or on both sides of the promoter sequence to facilitate HDR-type integration of the donor sequence at the site of the DSB. The crRNAs, tracrRNA, and donor polynucleotides are purchased from Integrated DNA Technologies, Coralville, IA. Ribonucleoprotein (RNP) complexes are prepared using gRNA (crRNA:tracrRNA) complexes and Cas9 nuclease (Aldevron, Fargo, ND). Each individual RNP is delivered together with GA2ox promoter donor molecule to maize protoplasts using procedures similar to those described in Examples 13-16. Integration of the heterologous promoter is expected to result in localized upregulation of ZmPLA1 expression. Similar genomic modification is carried out in maize germline cells using procedures as described in Examples 31-34; the resulting maize plants containing such a genomic modification (operably linking the ZmGA2ox promoter to ZmPLA1) are predicted to have increased leaf area, increased biomass, and/or increased seed yield, compared to plants lacking the genomic modification. Growth chamber and field assays for measuring leaf area, biomass, or seed yield are described in detail in Sun et al. (2017) Nature Communications, 8:14752; DOI: 10.1038/ncomms14752.

### Example 39

[0533] This example describes the modification of four genes in a maize cell or plant to provide increased nitrogen use efficiency (NUE).

[0534] An increase in expression of NRT2.2 (Zm00001d054060) is predicted to increase nitrogen use efficiency. A partial genomic sequence of NRT2.2 is provided as SEQ ID NO:381. A nitrogen responsive element sequence encoded by a polynucleotide (such as a double-stranded DNA, a single-stranded DNA, a single-stranded DNA/RNA hybrid, or a double-stranded DNA/RNA hybrid) is inserted upstream of the transcription start site (TSS) of the NRT2.2 coding region at a double-strand break effected between nucleotides at positions 101/102 of SEQ ID NO:381 in order to enhance the expression of NRT2.2. The nitrogen responsive element (AtNRE, see Examples 9, 13, and 16) is encoded by a 43 base-pair chemically modified dsDNA (Integrated DNA Technologies, Coralville, IA) having a first strand with the sequence of SEQ ID NO:349 annealed to a second strand with the sequence of SEQ ID NO:350; each strand was phosphorylated on the 5′ end and contained two phosphorothioate linkages at each terminus (i. e., the two linkages between the most distal three bases on either end of the strand). A NRT2.2 crRNA with the sequence of SEQ ID NO:397 is designed to target the nucleotides shown in bold italic in SEQ ID NO:381 (Table 16); the crRNA and tracrRNA are purchased from Integrated DNA Technologies, Coralville, IA. Ribonucleoprotein (RNP) complexes are prepared using gRNA (crRNA:tracrRNA) and Cas9 nuclease (Aldevron, Fargo, ND). Integration of the NRE sequence into the NRT2.2 gene is carried out using procedures similar to those described in Examples 13-16. Similar genomic modification is carried out in maize germline cells using procedures as described in Examples 31-34; the resulting maize plants containing such a genomic modification are predicted to have increased nitrogen use efficiency.

[0535] An increase in expression of NRT2.2 and GLN1.4 (Zm00001d051804) simultaneously is predicted to further increase nitrogen use efficiency. A partial genomic sequence of GLN1.4 is provided as SEQ ID NO:382. A nitrogen responsive element sequence encoded by a polynucleotide (such as a double-stranded DNA, a single-stranded DNA, a single-stranded DNA/RNA hybrid, or a double-stranded DNA/RNA hybrid) donor molecule is inserted upstream of the transcription start site (TSS) of the GLN1.4 coding region at a double-strand break effected between nucleotides at positions 115/116 of SEQ ID NO:382 in order to enhance the expression of GLN1.4. The NRE is provided as a 43 base-pair chemically modified dsDNA (Integrated DNA Technologies, Coralville, IA) having a first strand with the sequence of SEQ ID NO:349 annealed to a second strand with the sequence of SEQ ID NO:350; each strand was phosphorylated on the 5′ end and contained two phosphorothioate linkages at each terminus (i. e., the two linkages between the most distal three bases on either end of the strand). A GLN1.4 crRNA with the sequence of SEQ ID NO:398 is designed to target the nucleotide shown in bold italic in SEQ ID NO:382 (Table 16); the crRNA and tracrRNA are purchased from Integrated DNA Technologies, Coralville, IA. Ribonucleoprotein (RNP) complexes are prepared using gRNA (crRNA:tracrRNA) and Cas9 nuclease (Aldevron, Fargo, ND). Integration of the NRE sequence into the GLN1.4 gene is carried out using procedures similar to those described in Examples 13-16. Similar genomic modification is carried out in maize germline cells using procedures as described in Examples 31-34; the resulting maize plants containing such a genomic modification are predicted to have increased nitrogen use efficiency.

[0536] An increase in expression of NRT2.2, GLN1.4, and Dof1 (Zm00001d031278) simultaneously is predicted to even further increase nitrogen use efficiency. A partial genomic sequence of Dof1 is provided as SEQ ID NO:383. Constitutive overexpression of Dof1 has been shown to result in increased photosynthesis under low nitrate conditions in rice (DOI: 10.1111/j.1467-7652.2011.00592.x). In this embodiment the expression of Dof1 is modified to be constitutively expressed by inserting a constitutive enhancer sequence. A maize OCS homologue (see Examples 8 and 16) encoded by a chemically modified single-stranded DNA with the sequence of SEQ ID NO:343 (Integrated DNA Technologies, Coralville, IA), phosphorylated on the 5′ end and containing two phosphorothioate linkages at each terminus (i. e., the two linkages between the most distal three bases on either end of the strand), is designed for insertion upstream of the transcription start site (TSS) of the Dof1 coding region at a double-strand break effected between nucleotides at positions 101/102 of SEQ ID NO:383 in order to enhance the expression of Dof1. A Dof1 crRNA with the sequence of SEQ ID NO:399 is designed to target the nucleotides shown in bold italic in SEQ ID NO:383 (Table 16); crRNA and tracrRNA are purchased from Integrated DNA Technologies, Coralville, IA. Ribonucleoprotein (RNP) complexes are prepared using gRNA (crRNA:tracrRNA) and Cas9 nuclease (Aldevron, Fargo, ND). Integration of the maize OCS homologue sequence into the Dof1 gene is carried out using procedures similar to those described in Examples 13-16. Similar genomic modification is carried out in maize germline cells using procedures as described in Examples 31-34; the resulting maize plants containing such a genomic modification are predicted to have increased nitrogen use efficiency.

[0537] An increase in expression of NRT2.2, GLN1.4, Dof1, and an SPX domain-containing gene simultaneously is predicted to even further increase nitrogen use efficiency. The maize SPX domain-containing gene selected for modification is GRMZM2G086430. A partial 5′ untranslated region (5′ UTR) sequence of this gene is provided as SEQ ID NO:998. The miRNA recognition site is located at nucleotide positions 267-287 of SEQ ID NO:998. Two crRNAs are designed to effect DSBs on either side of the miRNA recognition site, resulting in a 66 base-pair deletion in the genomic sequence; the first crRNA with the sequence of SEQ ID NO:1000 is designed to effect a DSB at 262 base-pairs downstream of (5′ to) the transcription start site (TSS) and the second crRNA with the sequence of SEQ ID NO:1001 is designed to effect a DSB at 328 base-pairs downstream of (5′ to) the TSS. The crRNAs and tracrRNA are purchased from Integrated DNA Technologies, Coralville, IA. Ribonucleoprotein (RNP) complexes are prepared using gRNA (crRNA:tracrRNA) complexes and Cas9 nuclease (Aldevron, Fargo, ND). The two RNPs are delivered together to the maize protoplasts using procedures similar to those described in Examples 13-16. The resulting partial sequence deletion in non-coding sequence of the SPX gene is expected to decouple the gene's expression from endogenous miRNA regulation, i. e., deregulating SPX expression in response to nitrate sufficient or phosphate sufficient conditions. Similar genomic modification is carried out in maize germline cells using procedures as described in Examples 31-34; the resulting maize plants containing such a genomic modification (decoupling of SPX expression from miRNA regulation) are predicted to have increased nitrogen use efficiency, especially under conditions of nitrogen deficiency.

### Example 40

[0538] This example describes the modification of two maize genes to improve water use efficiency and to increase biomass and seed yield in a maize cell or plant.

[0539] An increase in expression of NAC111 is predicted to improve water use efficiency. The MITE insertion in the 5′ untranslated region (5′ UTR) of the maize NAC111 gene is modified in order to increase ZmNAC111 expression. The promoter sequence of NAC111 is provided as SEQ ID NO:1002, with the MITE sequence located at nucleotide positions 103-186 of SEQ ID NO:1002 (i. e., 414-498 base-pairs upstream of the NAC111 transcription start site).

[0540] In one approach, the MITE sequence is deleted or made non-functional by effecting at least one DSB in the MITE sequence. Two crRNAs are designed to effect DSBs on either side of the MITE sequence, resulting in deletion of the MITE sequence; the first crRNA with the sequence of SEQ ID NO:1003 is designed to effect a DSB 525 base-pairs upstream of the transcription start site (TSS) and the second crRNA with the sequence of SEQ ID NO:1004 is designed to effect a DSB at 396 base-pairs upstream of the TSS. The crRNAs and tracrRNA are purchased from Integrated DNA Technologies, Coralville, IA. Ribonucleoprotein (RNP) complexes are prepared using gRNA (crRNA:tracrRNA) complexes and Cas9 nuclease (Aldevron, Fargo, ND). The two RNPs are delivered together to the maize protoplasts using procedures similar to those described in Examples 13-16. The resulting partial sequence deletion in non-coding sequence of the ZmNAC111 gene is expected to result in upregulation of ZmNAC111 expression. Similar genomic modification is carried out in maize germline cells using procedures as described in Examples 31-34; the resulting maize plants containing such a genomic modification (deletion of the MITE sequence) are predicted to have increased water use efficiency (measured, e. g., by comparison of biomass or of seed yield of plants grown under different water availability regimes) and therefore enhanced drought tolerance.

[0541] In another approach, the MITE sequence is modified by targeted demethylation. Constructs encoding a modified dCas9-SunTag and an anti-GCN4 scFv fused to ten-eleven hydroxylase 1 (TET1), as described in detail by Morita et al. (2016) Nature Biotechnol., 34:1060-1065; doi: 10.1038/nbt.3658), are used to demethylate the ZmNAC111 MITE region; these plasmids are publicly available from Addgene (see www[dot]addgene[dot]org/browse/article/22324/). Two crRNAs targeting the MITE region in the promoter of ZmNAC111 were designed to bring TET1 to MITE region and trigger demethylation; the first crRNA with the sequence of SEQ ID NO:1003 is designed to target 508-528 base-pairs upstream of the transcription start site (TSS) and the second crRNA with the sequence of SEQ ID NO:1005 is designed to target 425-445 base-pairs upstream of the TSS. The crRNAs and tracrRNA are purchased from Integrated DNA Technologies, Coralville, IA. Ribonucleoprotein (RNP) complexes are prepared using gRNA (crRNA:tracrRNA) complexes and Cas9 nuclease (Aldevron, Fargo, ND). The two RNPs are delivered together with the dCas9-SunTag and anti-GCN4 scFv/TET1 fusion plasmids to the maize protoplasts using procedures similar to those described in Examples 13-16. The resulting demethylation of the MITE region of the ZmNAC111 gene is expected to result in upregulation of ZmNAC111 expression. Similar genomic modification is carried out in maize germline cells using procedures as described in Examples 31-34; the resulting maize plants containing such a genomic modification (demethylation of the MITE sequence) are predicted to have increased water use efficiency (measured, e. g., by comparison of biomass or of seed yield of plants grown under different water availability regimes) and therefore enhanced drought tolerance.

[0542] An increase in expression of NAC111 and an increase in expression of PLA1 simultaneously is predicted to result in improved water use efficiency, increased leaf size, increased biomass, and increased seed yield. A partial genomic sequence of ZmPLA1 is provided as SEQ ID NO:1015. Three crRNAs targeting this region upstream of the ZmPLA1 TSS were designed effect double-strand breaks (DSBs) upstream or slightly downstream of the TSS; the first crRNA with the sequence of SEQ ID NO:1016 is designed to effect a DSB 150 base-pairs upstream of (5′ to) the transcription start site (TSS), the second crRNA with the sequence of SEQ ID NO:1017 is designed to effect a DSB 95 base-pairs upstream of the TSS, and the third crRNA with the sequence of SEQ ID NO:1018 is designed to effect a DSB 19 base-pairs downstream of (3′ to) the TSS. The sequence to be inserted at a DSB was a 2,046-bp promoter sequence of the maize GA2-oxidase with the sequence of SEQ ID NO:1019. Polynucleotide (such as a double-stranded DNA, a single-stranded DNA, a single-stranded DNA/RNA hybrid, or a double-stranded DNA/RNA hybrid) donor molecules are designed including the ZmGA2ox promoter (SEQ ID NO:1019) with the addition of homology arms (generally including about 50 to about 1000 nucleotides having sufficient sequence identity or complementarity to the genomic sequence flanking the site of the DSB) on one or on both sides of the promoter sequence to facilitate HDR-type integration of the donor sequence at the site of the DSB. The crRNAs, tracrRNA, and donor polynucleotides are purchased from Integrated DNA Technologies, Coralville, IA. Ribonucleoprotein (RNP) complexes are prepared using gRNA (crRNA:tracrRNA) complexes and Cas9 nuclease (Aldevron, Fargo, ND). Each individual RNP is delivered together with GA2ox promoter donor molecule to maize protoplasts using procedures similar to those described in Examples 13-16. Integration of the heterologous promoter is expected to result in localized upregulation of ZmPLA1 expression. Similar genomic modification is carried out in maize germline cells using procedures as described in Examples 31-34; the resulting maize plants containing such a genomic modification (operably linking the ZmGA2ox promoter to ZmPLA1) are predicted to have increased leaf area, increased biomass, and/or increased seed yield, compared to plants lacking the genomic modification. Growth chamber and field assays for measuring leaf area, biomass, or seed yield are described in detail in Sun et al. (2017) Nature Communications, 8:14752; DOI: 10.1038/ncomms14752.

### Example 41

[0543] This example describes the modification of four maize genes to provide increased nitrogen use efficiency, increased biomass and seed yield, hypersensitivity to ABA, and increased water use efficiency.

[0544] An increase in expression of NRT2.2, GLN1.4, Dof1, or an SPX domain-containing gene is predicted to increase nitrogen use efficiency.

[0545] An increase in expression of NRT2.2 (Zm00001d054060) is predicted to increase nitrogen use efficiency. A partial genomic sequence of NRT2.2 is provided as SEQ ID NO:381. A nitrogen responsive element sequence encoded by a polynucleotide (such as a double-stranded DNA, a single-stranded DNA, a single-stranded DNA/RNA hybrid, or a double-stranded DNA/RNA hybrid) is inserted upstream of the transcription start site (TSS) of the NRT2.2 coding region at a double-strand break effected between nucleotides at positions 101/102 of SEQ ID NO:381 in order to enhance the expression of NRT2.2. The nitrogen responsive element (AtNRE, see Examples 9, 13, and 16) is encoded by a 43 base-pair chemically modified dsDNA (Integrated DNA Technologies, Coralville, IA) having a first strand with the sequence of SEQ ID NO:349 annealed to a second strand with the sequence of SEQ ID NO:350; each strand was phosphorylated on the 5′ end and contained two phosphorothioate linkages at each terminus (i. e., the two linkages between the most distal three bases on either end of the strand). A NRT2.2 crRNA with the sequence of SEQ ID NO:397 is designed to target the nucleotides shown in bold italic in SEQ ID NO:381 (Table 16); the crRNA and tracrRNA are purchased from Integrated DNA Technologies, Coralville, IA. Ribonucleoprotein (RNP) complexes are prepared using gRNA (crRNA:tracrRNA) and Cas9 nuclease (Aldevron, Fargo, ND). Integration of the NRE sequence into the NRT2.2 gene is carried out using procedures similar to those described in Examples 13-16. Similar genomic modification is carried out in maize germline cells using procedures as described in Examples 31-34; the resulting maize plants containing such a genomic modification are predicted to have increased nitrogen use efficiency.

[0546] An increase in expression of GLN1.4 (Zm00001d051804) is predicted to increase nitrogen use efficiency. A partial genomic sequence of GLN1.4 is provided as SEQ ID NO:382. A nitrogen responsive element sequence encoded by a polynucleotide (such as a double-stranded DNA, a single-stranded DNA, a single-stranded DNA/RNA hybrid, or a double-stranded DNA/RNA hybrid) donor molecule is inserted upstream of the transcription start site (TSS) of the GLN1.4 coding region at a double-strand break effected between nucleotides at positions 115/116 of SEQ ID NO:382 in order to enhance the expression of GLN1.4. The NRE is provided as a 43 base-pair chemically modified dsDNA (Integrated DNA Technologies, Coralville, IA) having a first strand with the sequence of SEQ ID NO:349 annealed to a second strand with the sequence of SEQ ID NO:350; each strand was phosphorylated on the 5′ end and contained two phosphorothioate linkages at each terminus (i. e., the two linkages between the most distal three bases on either end of the strand). A GLN1.4 crRNA with the sequence of SEQ ID NO:398 is designed to target the nucleotide shown in bold italic in SEQ ID NO:382 (Table 16); the crRNA and tracrRNA are purchased from Integrated DNA Technologies, Coralville, IA. Ribonucleoprotein (RNP) complexes are prepared using gRNA (crRNA:tracrRNA) and Cas9 nuclease (Aldevron, Fargo, ND). Integration of the NRE sequence into the GLN1.4 gene is carried out using procedures similar to those described in Examples 13-16. Similar genomic modification is carried out in maize germline cells using procedures as described in Examples 31-34; the resulting maize plants containing such a genomic modification are predicted to have increased nitrogen use efficiency.

[0547] An increase in expression of Dof1 (Zm00001d031278) is predicted to increase nitrogen use efficiency. A partial genomic sequence of Dof1 is provided as SEQ ID NO:383. Constitutive overexpression of Dof1 has been shown to result in increased photosynthesis under low nitrate conditions in rice (DOI: 10.1111/j.1467-7652.2011.00592.x). In this embodiment the expression of Dof1 is modified to be constitutively expressed by inserting a constitutive enhancer sequence. A maize OCS homologue (see Examples 8 and 16) encoded by a chemically modified single-stranded DNA with the sequence of SEQ ID NO:343 (Integrated DNA Technologies, Coralville, IA), phosphorylated on the 5′ end and containing two phosphorothioate linkages at each terminus (i. e., the two linkages between the most distal three bases on either end of the strand), is designed for insertion upstream of the transcription start site (TSS) of the Dof1 coding region at a double-strand break effected between nucleotides at positions 101/102 of SEQ ID NO:383 in order to enhance the expression of Dof1. A Dof1 crRNA with the sequence of SEQ ID NO:399 is designed to target the nucleotides shown in bold italic in SEQ ID NO:383 (Table 16); crRNA and tracrRNA are purchased from Integrated DNA Technologies, Coralville, IA. Ribonucleoprotein (RNP) complexes are prepared using gRNA (crRNA:tracrRNA) and Cas9 nuclease (Aldevron, Fargo, ND). Integration of the maize OCS homologue sequence into the Dof1 gene is carried out using procedures similar to those described in Examples 13-16. Similar genomic modification is carried out in maize germline cells using procedures as described in Examples 31-34; the resulting maize plants containing such a genomic modification are predicted to have increased nitrogen use efficiency.

[0548] An increase in transcript stability of an SPX domain-containing gene simultaneously is predicted to increase nitrogen use efficiency. The maize SPX domain-containing gene selected for modification is GRMZM2G086430. A partial 5′ untranslated region (5′ UTR) sequence of this gene is provided as SEQ ID NO:998. The miRNA recognition site is located at nucleotide positions 267-287 of SEQ ID NO:998. Two crRNAs are designed to effect DSBs on either side of the miRNA recognition site, resulting in a 66 base-pair deletion in the genomic sequence; the first crRNA with the sequence of SEQ ID NO:1000 is designed to effect a DSB at 262 base-pairs downstream of (5′ to) the transcription start site (TSS) and the second crRNA with the sequence of SEQ ID NO:1001 is designed to effect a DSB at 328 base-pairs downstream of (5′ to) the TSS. The crRNAs and tracrRNA are purchased from Integrated DNA Technologies, Coralville, IA. Ribonucleoprotein (RNP) complexes are prepared using gRNA (crRNA:tracrRNA) complexes and Cas9 nuclease (Aldevron, Fargo, ND). The two RNPs are delivered together to the maize protoplasts using procedures similar to those described in Examples 13-16. The resulting partial sequence deletion in non-coding sequence of the SPX gene is expected to decouple the gene's expression from endogenous miRNA regulation, i. e., deregulating SPX expression in response to nitrate sufficient or phosphate sufficient conditions. Similar genomic modification is carried out in maize germline cells using procedures as described in Examples 31-34; the resulting maize plants containing such a genomic modification (decoupling of SPX expression from miRNA regulation) are predicted to have increased nitrogen use efficiency, especially under conditions of nitrogen deficiency.

[0549] An increase in expression of NRT2.2, GLN1.4, Dof1, or an SPX domain-containing gene and an increase in expression of PLA1 simultaneously is predicted to result in increased nitrogen use efficiency, increased leaf size, increased biomass, and increased seed yield. A partial genomic sequence of ZmPLA1 is provided as SEQ ID NO:1015. Three crRNAs targeting this region upstream of the ZmPLA1 TSS were designed effect double-strand breaks (DSBs) upstream or slightly downstream of the TSS; the first crRNA with the sequence of SEQ ID NO:1016 is designed to effect a DSB 150 base-pairs upstream of (5′ to) the transcription start site (TSS), the second crRNA with the sequence of SEQ ID NO:1017 is designed to effect a DSB 95 base-pairs upstream of the TSS, and the third crRNA with the sequence of SEQ ID NO:1018 is designed to effect a DSB 19 base-pairs downstream of (3′ to) the TSS. The sequence to be inserted at a DSB was a 2,046-bp promoter sequence of the maize GA2-oxidase with the sequence of SEQ ID NO:1019. Polynucleotide (such as a double-stranded DNA, a single-stranded DNA, a single-stranded DNA/RNA hybrid, or a double-stranded DNA/RNA hybrid) donor molecules are designed including the ZmGA2ox promoter (SEQ ID NO:1019) with the addition of homology arms (generally including about 50 to about 1000 nucleotides having sufficient sequence identity or complementarity to the genomic sequence flanking the site of the DSB) on one or on both sides of the promoter sequence to facilitate HDR-type integration of the donor sequence at the site of the DSB. The crRNAs, tracrRNA, and donor polynucleotides are purchased from Integrated DNA Technologies, Coralville, IA. Ribonucleoprotein (RNP) complexes are prepared using gRNA (crRNA:tracrRNA) complexes and Cas9 nuclease (Aldevron, Fargo, ND). Each individual RNP is delivered together with GA2ox promoter donor molecule to maize protoplasts using procedures similar to those described in Examples 13-16. Integration of the heterologous promoter is expected to result in localized upregulation of ZmPLA1 expression. Similar genomic modification is carried out in maize germline cells using procedures as described in Examples 31-34; the resulting maize plants containing such a genomic modification (operably linking the ZmGA2ox promoter to ZmPLA1) are predicted to have increased leaf area, increased biomass, and/or increased seed yield, compared to plants lacking the genomic modification. Growth chamber and field assays for measuring leaf area, biomass, or seed yield are described in detail in Sun et al. (2017) Nature Communications, 8:14752; DOI: 10.1038/ncomms14752.

[0550] An increase in expression of NRT2.2, GLN1.4, Dof1, or an SPX domain-containing gene, an increase in expression of PLA1, and a modified ABA hypersensitive PYL-E simultaneously is predicted to result in increased nitrogen use efficiency, increased leaf size, increased biomass, increased seed yield, and increased water use efficiency. The genomic sequence of ZmPYL-E provided as SEQ ID NO:1006 and a cDNA sequence is provided as SEQ ID NO:1007, which encodes the native amino acid sequence provided as SEQ ID NO:1008. In one approach, an ABA-hypersensitive ZmPLY-E allele is designed to have an amino acid change of E149L, i. e., glutamic acid (E) to leucine (L) at position 149 in the ZmPyl-E polypeptide. A non-limiting embodiment includes changing the codon encoding the amino acid at position 149 from GAG to CTG. A cDNA encoding the hypersensitive ZmPYL-E allele with the E149L mutation has the sequence of SEQ ID NO:1009. A single-guide RNA (sgRNA) including the sequence of SEQ ID NO:1010 is designed to effect a double-strand break (DSB) close to the nucleotides encoding the codon at position 149; the complete sgRNA sequence is provided as SEQ ID NO:1011, which includes a 33-nucleotide RNA extension to the 3′ end of the sgRNA that acts as a tether to non-covalently link the Cas9/sgRNA complex by RNA:DNA duplex formation with a DNA donor molecule with homology arms that acts as an HDR template for editing the ZmPyl-E gene to effect the E149L amino acid change. This HDR template has the sequence of SEQ ID NO:1013 which includes a 33-nucleotide DNA extension, which is complementary to and will bind with the tether extension on the sgRNA. The HDR template encodes the E149L codon substitution and in addition encodes a mutation in the valine 152 codon which destroys the PAM site and prevents further cleavage by Cas9. The sgRNA and donor polynucleotides are purchased from Integrated DNA Technologies, Coralville, IA. Ribonucleoprotein (RNP) complexes are prepared using gRNA, HDR template and Cas9 nuclease (Aldevron, Fargo, ND). To assemble the complex, equal-molar amounts of sgRNA and polynucleotide donor molecule are mixed and heated to 95 degrees Celsius for 5 minutes, then removed from the heat and allowed to cool to room temperature. The appropriate amount of Cas9 is then added to sgRNA:donor complex and incubated at room temperature for 5 minutes. In embodiments, the Cas9:sgRNA:donor complex is delivered to maize cells by microinjection (e. g., into 1-3 days-after-pollination zygotes), electroporation (e. g., into 9-12 days-after-pollination zygotes), or bombardment or Biolistics (e. g., into 9-12 days-after-pollination zygotes). Biolistic delivery of RNPs to maize embryos is carried out using procedures similar to those described by Svitashev et al. (2016) Nature Communications, doi:10.1038/ncomms13274. The microinjection approach is described in Example 34. The electroporation approach is similar to techniques useful in wheat; see, e. g., T. Hagio (2009) “Direct Gene Transfer into Plant Mature Seeds via Electroporation After Vacuum Treatment.” In: Electroporation and Sonoporation in Developmental Biology, edited by H. Nakamura, Springer, Japan, doi:10.1007/978-4-431-09427-2_25; and Klöt et al. (1993) Plant Cell Reports, 12:671-75, doi:10.1007/BF00233417. This method can be applied to excised 9-12 days-after-pollination embryos or partially germinated seed. Briefly, 20 seed are placed in germination buffer (0.2% polyvinylpyrrolidone (PVP), 0.001% active chlorine) in the dark at 10 degrees Celsius for 3 days. The seed are then transferred to electroporation buffer (0.25% polyvinylpyrrolidone (PVP), 0.15% Tween 20, 5 millimolar spermidine, 0.5% Cellulase (Onozuka RS), 0.125 molar calcium chloride dihydrate) containing the ZmPYL-E RNP complex described above. The mixture is placed under vacuum (0.9 Bar) for 3 hours at room temperature (22 degrees Celsius) for 3 hours. The seed are then placed in a 1-1.5 centimeter electroporation cuvette with the scutellum facing the positive electrode and submerged in electroporation buffer. An electronic pulse is delivered using a BTX Gemini X2 waveform generator (square waves, 75 volts, 50 millisecond pulse duration, 10 pulses/second, 100 pulses) one to three times. The seed are returned to germination medium and cultured in the dark at 26 degrees Celsius for 48 hours. Individual seed are then processed to evaluate the presence or absence of the intended edit.

[0551] An increase in expression of NRT2.2, GLN1.4, Dof1, or an SPX domain-containing gene, an increase in expression of PLA1, a modified ABA hypersensitive PYL-E, and an increase in expression of NAC111 simultaneously is predicted to result in increased nitrogen use efficiency, increased leaf size, increased biomass, increased seed yield, and further increased water use efficiency. The MITE insertion in the 5′ untranslated region (5′ UTR) of the maize NAC111 gene is modified in order to increase ZmNAC111 expression. The promoter sequence of NAC111 is provided as SEQ ID NO:1002, with the MITE sequence located at nucleotide positions 103-186 of SEQ ID NO:1002 (i. e., 414-498 base-pairs upstream of the NAC111 transcription start site).

[0552] In one approach, the MITE sequence is deleted or made non-functional by effecting at least one DSB in the MITE sequence. Two crRNAs are designed to effect DSBs on either side of the MITE sequence, resulting in deletion of the MITE sequence; the first crRNA with the sequence of SEQ ID NO:1003 is designed to effect a DSB 525 base-pairs upstream of the transcription start site (TSS) and the second crRNA with the sequence of SEQ ID NO:1004 is designed to effect a DSB at 396 base-pairs upstream of the TSS. The crRNAs and tracrRNA are purchased from Integrated DNA Technologies, Coralville, IA. Ribonucleoprotein (RNP) complexes are prepared using gRNA (crRNA:tracrRNA) complexes and Cas9 nuclease (Aldevron, Fargo, ND). The two RNPs are delivered together to the maize protoplasts using procedures similar to those described in Examples 13-16. The resulting partial sequence deletion in non-coding sequence of the ZmNAC111 gene is expected to result in upregulation of ZmNAC111 expression. Similar genomic modification is carried out in maize germline cells using procedures as described in Examples 31-34; the resulting maize plants containing such a genomic modification (deletion of the MITE sequence) are predicted to have increased water use efficiency (measured, e. g., by comparison of biomass or of seed yield of plants grown under different water availability regimes) and therefore enhanced drought tolerance.

[0553] In another approach, the MITE sequence is modified by targeted demethylation. Constructs encoding a modified dCas9-SunTag and an anti-GCN4 scFv fused to ten-eleven hydroxylase 1 (TET1), as described in detail by Morita et al. (2016) Nature Biotechnol., 34:1060-1065; doi: 10.1038/nbt.3658), are used to demethylate the ZmNAC1 11 MITE region; these plasmids are publicly available from Addgene (see www[dot]addgene[dot]org/browse/article/22324/). Two crRNAs targeting the MITE region in the promoter of ZmNAC111 were designed to bring TET1 to MITE region and trigger demethylation; the first crRNA with the sequence of SEQ ID NO:1003 is designed to target 508-528 base-pairs upstream of the transcription start site (TSS) and the second crRNA with the sequence of SEQ ID NO:1005 is designed to target 425-445 base-pairs upstream of the TSS. The crRNAs and tracrRNA are purchased from Integrated DNA Technologies, Coralville, IA. Ribonucleoprotein (RNP) complexes are prepared using gRNA (crRNA:tracrRNA) complexes and Cas9 nuclease (Aldevron, Fargo, ND). The two RNPs are delivered together with the dCas9-SunTag and anti-GCN4 scFv/TET1 fusion plasmids to the maize protoplasts using procedures similar to those described in Examples 13-16. The resulting demethylation of the MITE region of the ZmNAC111 gene is expected to result in upregulation of ZmNAC111 expression. Similar genomic modification is carried out in maize germline cells using procedures as described in Examples 31-34; the resulting maize plants containing such a genomic modification (demethylation of the MITE sequence) are predicted to have increased water use efficiency (measured, e. g., by comparison of biomass or of seed yield of plants grown under different water availability regimes) and therefore enhanced drought tolerance.

### Example 42

[0554] This example describes modification of different members in the same enzyme family or different family to maximize nitrogen use efficiency (NUE). Examples of genes and enzyme families are shown in Table 22. QPCR or RNA-Seq are used to evaluate NUE by investigating nitrate responsive gene expression level.

TABLE 22

| | | | Change in | Element | SEQ ID |
|---|---|---|---|---|---|
| Enzyme family | Member | Gene ID | gene activity | inserted | NO: |
| nitrate | ZmNRT1.1A | GRMZM2G086496 | Upregulate | AtNRE | SEQ ID |
| transporter | | | | | NO: 1020 |
| (NRT) | ZmNRT1.1B | GRMZM2G161459 | Upregulate | AtNRE | SEQ ID |
| | | | | | NO: 1021 |
| | ZmNRT1.1Ca | GMRZM2G112154 | Upregulate | AtNRE | SEQ ID |
| | | | | | NO: 1022 |
| | ZmNRT1.1D | GMRZM2G161483 | Upregulate | AtNRE | SEQ ID |
| | | | | | NO: 1023 |
| | ZmNRT1.2 | GRMZM2G137421 | Upregulate | AtNRE | |
| | ZmNRT1.3 | GMRZM2G176253 | Upregulate | AtNRE | |
| | ZmNRT1.4A | GMRZM2G064091 | Upregulate | AtNRE | |
| | ZmNRT1.4B | GMRZM2G476069 | Upregulate | AtNRE | |
| | ZmNRT1.5A | GRMZM2G044851 | Upregulate | AtNRE | |
| | ZmNRT1.5B | GMRZM2G061303 | Upregulate | AtNRE | |
| | ZmNRT2.1 | GRMZM2G010280 | Upregulate | AtNRE | |
| | ZmNRT2.2 | GRMZM2G010251 | Upregulate | AtNRE | |
| | ZmNRT2.3 | GRMZM2G163866 | Upregulate | AtNRE | |
| | ZmNRT2.5 | GMRZM2G455124 | Upregulate | AtNRE | |
| | ZmNRT3.1A | GRMZM2G179294 | Upregulate | AtNRE | |
| | ZmNRT3.1B | GMRZM2G163494 | Upregulate | AtNRE | |
| | ZmNRT3.2 | GMRZM2G808737 | Upregulate | AtNRE | |
| Transcription | Dof1 | Zm00001d031278 | Upregulate | AtNRE | |
| factor | | | | | |
| glutamine | ZmGln1.1 | P38559.1 | Upregulate | AtNRE | |
| synthetase | ZmGln1.2 | CAA46720.1 | Upregulate | AtNRE | |
| (GS) | ZmGln1.3 | CAA46721.1 | Upregulate | AtNRE | |
| | ZmGln1.4 | CAA46722.1 | Upregulate | AtNRE | |
| | ZmGln1.5 | P38563.2 | Upregulate | AtNRE | |
| | ZmGS2 | CAA46724.1 | Upregulate | AtNRE | SEQ ID |
| | | | | | NO: 1024 |
| glutamate | GOGAT1 | GRMZM2G077054 | Upregulate | AtNRE | |
| synthase | GOGAT2 | GRMZM2G085078 | Upregulate | AtNRE | SEQ ID |
| (GOGAT) | | | | | NO: 1026 |
| | GOGAT3 | GRMZM2G375064 | Upregulate | AtNRE | |
| | FGS1 | GRMZM2G036609 | Upregulate | AtNRE | |
| alanine | AlaAT1 | Zm00001d003953 | Upregulate | AtNRE | |
| aminotransferase | AlaAT2 | Zm00001d030557 | Upregulate | AtNRE | SEQ ID |
| (AlaAT) | | | | | NO: 1053 |
| | AlaAT3 | Zm00001d008277 | Upregulate | AtNRE | |
| | AlaAT4 | Zm00001d006875 | Upregulate | AtNRE | |
| | AlaAT1b | Zm00001d032984 | Upregulate | AtNRE | SEQ ID |
| | | | | | NO: 1028 |
| | AlaAT6 | Zm00001d020590 | Upregulate | AtNRE | |
| | AlaAT7 | Zm00001d022152 | Upregulate | AtNRE | |
| | AlaAT8 | Zm00001d044135 | Upregulate | AtNRE | |
| | AlaAT9 | Zm00001d014258 | Upregulate | AtNRE | |
| | AlaAT10 | Zm00001d018639 | Upregulate | AtNRE | |

[0555] Maize protoplasts are prepared as described in Example 1. Preparation of reagents, gene editing procedures, and detection of gene modifications are carried out using procedures similar to those described in Examples 13-16.

[0556] An increase in expression of NRT2.2 (Zm00001d054060) is predicted to increase nitrogen use efficiency. A partial genomic sequence of NRT2.2 is provided as SEQ ID NO:381. A nitrogen responsive element sequence encoded by a polynucleotide (such as a double-stranded DNA, a single-stranded DNA, a single-stranded DNA/RNA hybrid, or a double-stranded DNA/RNA hybrid) is inserted upstream of the transcription start site (TSS) of the NRT2.2 coding region at a double-strand break effected between nucleotides at positions 101/102 of SEQ ID NO:381 in order to enhance the expression of NRT2.2. The nitrogen responsive element (AtNRE, see Examples 9, 13, and 16) is encoded by a 43 base-pair chemically modified dsDNA (Integrated DNA Technologies, Coralville, IA) having a first strand with the sequence of SEQ ID NO:349 annealed to a second strand with the sequence of SEQ ID NO:350; each strand was phosphorylated on the 5′ end and contained two phosphorothioate linkages at each terminus (i. e., the two linkages between the most distal three bases on either end of the strand). A NRT2.2 crRNA with the sequence of SEQ ID NO:397 is designed to target the nucleotides shown in bold italic in SEQ ID NO:381 (Table 16); the crRNA and tracrRNA are purchased from Integrated DNA Technologies, Coralville, IA. Ribonucleoprotein (RNP) complexes are prepared using gRNA (crRNA:tracrRNA) and Cas9 nuclease (Aldevron, Fargo, ND). Integration of the NRE sequence into the NRT2.2 gene is carried out using procedures similar to those described in Examples 13-16. Similar genomic modification is carried out in maize germline cells using procedures as described in Examples 31-34; the resulting maize plants containing such a genomic modification are predicted to have increased nitrogen use efficiency.

[0557] An increase in expression of NRT2.2 and GLN1.4 (Zm00001d051804) simultaneously is predicted to further increase nitrogen use efficiency. A partial genomic sequence of GLN1.4 is provided as SEQ ID NO:382. A nitrogen responsive element sequence encoded by a polynucleotide (such as a double-stranded DNA, a single-stranded DNA, a single-stranded DNA/RNA hybrid, or a double-stranded DNA/RNA hybrid) donor molecule is inserted upstream of the transcription start site (TSS) of the GLN1.4 coding region at a double-strand break effected between nucleotides at positions 115/116 of SEQ ID NO:382 in order to enhance the expression of GLN1.4. The NRE is provided as a 43 base-pair chemically modified dsDNA (Integrated DNA Technologies, Coralville, IA) having a first strand with the sequence of SEQ ID NO:349 annealed to a second strand with the sequence of SEQ ID NO:350; each strand was phosphorylated on the 5′ end and contained two phosphorothioate linkages at each terminus (i. e., the two linkages between the most distal three bases on either end of the strand). A GLN1.4 crRNA with the sequence of SEQ ID NO:398 is designed to target the nucleotide shown in bold italic in SEQ ID NO:382 (Table 16); the crRNA and tracrRNA are purchased from Integrated DNA Technologies, Coralville, IA. Ribonucleoprotein (RNP) complexes are prepared using gRNA (crRNA:tracrRNA) and Cas9 nuclease (Aldevron, Fargo, ND). Integration of the NRE sequence into the GLN1.4 gene is carried out using procedures similar to those described in Examples 13-16. Similar genomic modification is carried out in maize germline cells using procedures as described in Examples 31-34; the resulting maize plants containing such a genomic modification are predicted to have increased nitrogen use efficiency.

[0558] An increase in expression of NRT2.2, GLN1.4, and Dof1 (Zm00001d031278) simultaneously is predicted to even further increase nitrogen use efficiency. A partial genomic sequence of Dof1 is provided as SEQ ID NO:383. Constitutive overexpression of Dof1 has been shown to result in increased photosynthesis under low nitrate conditions in rice (DOI: 10.1111/j.1467-7652.2011.00592.x). In this embodiment the expression of Dof1 is modified to be constitutively expressed by inserting a constitutive enhancer sequence. A maize OCS homologue (see Examples 8 and 16) encoded by a chemically modified single-stranded DNA with the sequence of SEQ ID NO:343 (Integrated DNA Technologies, Coralville, IA), phosphorylated on the 5′ end and containing two phosphorothioate linkages at each terminus (i. e., the two linkages between the most distal three bases on either end of the strand), is designed for insertion upstream of the transcription start site (TSS) of the Dof1 coding region at a double-strand break effected between nucleotides at positions 101/102 of SEQ ID NO:383 in order to enhance the expression of Dof1. A Dof1 crRNA with the sequence of SEQ ID NO:399 is designed to target the nucleotides shown in bold italic in SEQ ID NO:383 (Table 16); crRNA and tracrRNA are purchased from Integrated DNA Technologies, Coralville, IA. Ribonucleoprotein (RNP) complexes are prepared using gRNA (crRNA:tracrRNA) and Cas9 nuclease (Aldevron, Fargo, ND). Integration of the maize OCS homologue sequence into the Dof1 gene is carried out using procedures similar to those described in Examples 13-16. Similar genomic modification is carried out in maize germline cells using procedures as described in Examples 31-34; the resulting maize plants containing such a genomic modification are predicted to have increased nitrogen use efficiency.

### Example 43

[0559] Table 23 provides a list of genes in corn associated with various traits including abiotic stress resistance, plant architecture, biotic stress resistance, photosynthesis, and resource partitioning. Within each trait, various non-limiting (and often overlapping) sub-categories of traits may be identified, as presented in the Table. For example, “abiotic stress resistance” may be related to or associated with changes in abscisic acid (ABA) signaling, biomass, cold tolerance, drought tolerance, tolerance to high temperatures, tolerance to low temperatures, and/or salt tolerance; the trait “plant architecture” may be related to or may include traits such as biomass, fertilization, flowering time and/or flower architecture, inflorescence architecture, lodging resistance, root architecture, shoot architecture, leaf architecture, and yield; the trait “biotic stress” may include disease resistance, insect resistance, population density stress and/or shading stress; the trait “photosynthesis” can include photosynthesis and respiration traits; the trait “resource partitioning” can include or be related to biomass, seed weight, drydown rate, grain size, nitrogen utilization, oil production and metabolism, protein production and metabolism, provitamin A production and metabolism, seed composition, seed filling (including sugar and nitrogen transport), and starch production and metabolism. By modifying one or more of the associated genes in Table 23, each of these traits may be manipulated singly or in combination to improve the yield, productivity or other desired aspects of a corn plant comprising the modification(s).

[0560] Each of the genes listed in Table 23 may be modified using any of the gene modification methods described herein. In particular, each of the genes may be modified using the targeted modification methods described herein which introduce desired genomic changes at specific locations in the absence of off-target effects. Even more specifically, each of the genes in Table 23 may be modified using the CRISPR targeting methods described herein, either singly or in multiplexed fashion. For example, a single gene in Table 23 could be modified by the introduction of a single mutation (change in residue, insertion of residue(s), or deletion of residue(s)) or by multiple mutations. Another possibility is that a single gene in Table 23 could be modified by the introduction of two or more mutations, including two or more targeted mutations. In addition, or alternatively, two or more genes in Table 23 could be modified (e.g., using the targeted modification techniques described herein) such that the two or more genes each contains one or more modifications.

[0561] The various types of modifications that can be introduced into the genes of Table 23 have been described herein. The modifications include both modifications to regulatory regions that affect the expression of the gene product (i.e., the amount of proteins or RNA encoded by the gene) and modifications that affect the sequence or activity of the encoded protein or RNA (in some cases the same modification may affect both the expression level and the activity of the encoded protein or RNA). Modifying genes encoding proteins with the amino acid sequences listed in Table 23 (the even numbered SEQ IDs 434-562, 566, 568, and 572-762), or sequences with at least 95%, 96%, 97%, 98%, or 99% identity to the protein sequences listed in Table 23, may result in proteins with improved or diminished activity. Methods of alignment of sequences for comparison are well known in the art. Two examples of algorithms that are suitable for determining percent sequence identity and sequence similarity are the BLAST and BLAST 2.0 algorithms, which are described in Altschul et al., (1977) Nuc. Acids Res. 25:3389-3402; and Altschul et al., (1990) J. Mol. Biol. 215:403-410, respectively. Software for performing BLAST analyses is publicly available through the National Center for Biotechnology Information. Optimal alignment of sequences for comparison can also be conducted, e.g., by the local homology algorithm of Smith and Waterman, (1970) Adv. Appl. Math. 2:482c, by the homology alignment algorithm of Needleman and Wunsch, (1970) J. Mol. Biol. 48:443, by the search for similarity method of Pearson and Lipman, (1988) Proc. Nat'l. Acad. Sci. USA 85:2444, by computerized implementations of these algorithms (GAP, BESTFIT, FASTA, and TFASTA in the Wisconsin Genetics Software Package, Genetics Computer Group, 575 Science Dr., Madison, WI), or by manual alignment and visual inspection (see, e.g., Brent et al., (2003) Current Protocols in Molecular Biology).

[0562] In some cases, targeted modifications may result in proteins with no activity (e.g., the introduction of a stop codon may result in a functionless protein) or a protein with a new activity or feature. Similarly, the sequences of the miRNAs listed in Table 23 (SEQ IDs 563 and 569) may also be modified to increase, decrease or reduce their activity.

[0563] In addition to modifications to the encoded proteins or miRNAs, each of the gene sequences listed in Table 23 (the odd numbered SEQ IDs 433-761) may also be modified, individually or in combination with one or more other modifications, to alter the expression of the encoded protein or RNA, or to alter the stability of the RNA encoding the protein. For example, regulatory sequences affecting transcription of any of the genes listed in Table 23, including primer sequences and transcription factor binding sequences, can be modified, or introduced into, any of the gene sequences listed in Table 23 using the methods describes herein. The modifications can effect increases in transcription levels, decreases in transcription levels, and/or changes in the timing of transcription of the genes under control of the modified regulatory regions. Targeted epigenetic modifications affecting gene expression may also be introduced.

[0564] One skilled in the art will be able to identify regulatory regions (e.g., regulatory regions in the gene sequences provided in Table 23) using techniques described in the literature, e.g., Bartlett A. et al, “Mapping genome-wide transcription-factor binding sites using DAP-seq.”, Nat Protoc. (2017) August; 12(8):1659-1672; O'Malley R. C. et al, “Cistrome and Epicistrome Features Shape the Regulatory DNA Landscape”, Cell (2016) Sep. 8; 166(6):1598; He Y et al, “Improved regulatory element prediction based on tissue-specific local epigenomic signatures”, Proc Natl Acad Sci USA, (2017) Feb. 28; 114(9):E1633-E1640; Zefu Lu et al, “Combining ATAC-seq with nuclei sorting for discovery of cis-regulatory regions in plant genomes”, Nucleic Acids Research, (2017) V45(6); Rurika Oka et al, “Genome-wide mapping of transcriptional enhancer candidates using DNA and chromatin features in maize”, Genome Biology (2017) 18:137. In addition, Table 24, provided herein, lists sequences which may be inserted into or otherwise created in the genomic sequences of Table 23 for the purpose of regulating gene expression and/or transcript stability.

[0565] The stability of transcribed RNA encoded by the genes in Table 23 (in addition to other genes), can be increased or decreased by the targeted insertion or creation of the transcript stabilizing or destabilizing sequences provided in Table 24 (e.g., SEQ ID Nos. 942-944).

[0566] Any of the above regulatory modifications may be combined to regulate a single gene, or multiple genes, or they may be combined with the non-regulatory modifications discussed above to regulate the activity of a single modified gene, or multiple modified genes. The genetic modifications or gene regulatory changes discussed above may affect distinct traits in the corn cell or plant, or they make affect the same trait. The resulting effects of the described modifications on a trait or trait may be additive or synergistic. Modifications to the corn genes listed in Table 24 may be combined with modifications to other sequences in the corn genome for the purpose of improving one or more corn traits. The corn sequences of Table 24 may also be modified for the purpose of tracking the expression or localizing the expression or activity of the listed genes and gene products.

TABLE 23

| | Trait | | | Gene | Expression | Gene | Protein |
|---|---|---|---|---|---|---|---|
| Trait | subcategory | Gene(s) | GeneID | Product | Change | SEQ ID | SEQ ID |
| Abiotic | ABA | ZmbZIP17 | 100284034 | protein | Increase | SEQ ID | SEQ ID |
| stress | Signaling | | | | | NO: 433 | NO: 434 |
| Abiotic | Biomass | TsVP | 542328 | protein | Increase | SEQ ID | SEQ ID |
| stress | | | | | | NO: 435 | NO: 436 |
| Abiotic | Cold | ZmSEC14p | 100274321 | protein | Increase | SEQ ID | SEQ ID |
| stress | tolerance | | | | | NO: 437 | NO: 438 |
| Abiotic | Drought | ZmPLC1 | 542162 | protein | Increase | SEQ ID | SEQ ID |
| stress | tolerance | | | | | NO: 439 | NO: 440 |
| Abiotic | Drought | ZmNF-YB | 542390 | protein | Increase | SEQ ID | SEQ ID |
| stress | tolerance | | | | | NO: 441 | NO: 442 |
| Abiotic | Drought | D-myo- | 542540 | protein | Increase | SEQ ID | SEQ ID |
| stress | tolerance | inositol-3- | | | | NO: 443 | NO: 444 |
| | | phosphate | | | | | |
| | | synthase | | | | | |
| | | (IPS) | | | | | |
| Abiotic | Drought | ZmPIS | 542548 | protein | Increase | SEQ ID | SEQ ID |
| stress | tolerance | | | | | NO: 445 | NO: 446 |
| Abiotic | Drought | ZmGOLS2 | 606405 | protein | Increase | SEQ ID | SEQ ID |
| stress | tolerance | | | | | NO: 447 | NO: 448 |
| Abiotic | Drought | ZmPsbA | 845199 | protein | Increase | SEQ ID | SEQ ID |
| stress | tolerance | | | | | NO: 449 | NO: 450 |
| Abiotic | Drought | ZmSNAC1 | 100170665 | protein | Increase | SEQ ID | SEQ ID |
| stress | tolerance | | | | | NO: 451 | NO: 452 |
| Abiotic | Drought | ZmbZIP72 | 100191233 | protein | Increase | SEQ ID | SEQ ID |
| stress | tolerance | | | | | NO: 453 | NO: 454 |
| Abiotic | Drought | Zmhdz10 | 100194336 | protein | Increase | SEQ ID | SEQ ID |
| stress | tolerance | | | | | NO: 455 | NO: 456 |
| Abiotic | Drought | GB1 | 100217119 | protein | Increase | SEQ ID | SEQ ID |
| stress | tolerance | | | | | NO: 457 | NO: 458 |
| Abiotic | Drought | ACC | 100217270 | protein | Decrease | SEQ ID | SEQ ID |
| stress | tolerance | synthase | | | | NO: 459 | NO: 460 |
| Abiotic | Drought | ZmARGOS8 | 100275015 | protein | Increase | SEQ ID | SEQ ID |
| stress | tolerance | | | | | NO: 461 | NO: 462 |
| Abiotic | Drought | ZmPIF3 | 100279991 | protein | Increase | SEQ ID | SEQ ID |
| stress | tolerance | | | | | NO: 463 | NO: 464 |
| Abiotic | Drought | ZmNAC111 | 100502408 | protein | Increase | SEQ ID | SEQ ID |
| stress | tolerance | | | | | NO: 465 | NO: 466 |
| Abiotic | Drought | ZmRFP1 | 100280655 | protein | Increase | SEQ ID | SEQ ID |
| stress | tolerance | | | | | NO: 467 | NO: 468 |
| Abiotic | Drought | ZmPP2C-A | 732729 | protein | Increase | SEQ ID | SEQ ID |
| stress | tolerance | | | | | NO: 469 | NO: 470 |
| Abiotic | Drought | ZmABP9 | 100502540 | protein | Increase | SEQ ID | SEQ ID |
| stress | tolerance | | | | | NO: 471 | NO: 472 |
| Abiotic | Drought | ZmJAZ14 | 103626248 | protein | Increase | SEQ ID | SEQ ID |
| stress | tolerance | | | | | NO: 473 | NO: 474 |
| Abiotic | Drought | ZmNAC55 | 103643272 | protein | Increase | SEQ ID | SEQ ID |
| stress | tolerance | | | | | NO: 475 | NO: 476 |
| Abiotic | Drought | ABAZmPYL-3 | 100273694 | protein | AA change | SEQ ID | SEQ ID |
| stress | tolerance | | | | | NO: 477 | NO: 478 |
| Abiotic | flooding | HB2 | 732720 | protein | Increase | SEQ ID | SEQ ID |
| stress | tolerance | | | | | NO: 479 | NO: 480 |
| Abiotic | High | ZmAPT2 | 542148 | protein | Increase | SEQ ID | SEQ ID |
| stress | temperature | | | | | NO: 481 | NO: 482 |
| | and salt | | | | | | |
| | tolerance | | | | | | |
| Abiotic | low | ZmLEA3 | 100283639 | protein | Increase | SEQ ID | SEQ ID |
| stress | temperature | | | | | NO: 483 | NO: 484 |
| | stress | | | | | | |
| Abiotic | Low | ZmPP2C2 | 542176 | protein | Increase | SEQ ID | SEQ ID |
| stress | temperature | | | | | NO: 485 | NO: 486 |
| | tolerance | | | | | | |
| Abiotic | Salt tolerance | ZmSAPK8 | 100283283 | protein | Increase | SEQ ID | SEQ ID |
| stress | | | | | | NO: 487 | NO: 488 |
| Abiotic | Salt tolerance | ZmCIPK16 | 100285849 | protein | Increase | SEQ ID | SEQ ID |
| stress | | | | | | NO: 489 | NO: 490 |
| Abiotic | Salt tolerance | ZmPEAMT | 103651303 | protein | Increase | SEQ ID | SEQ ID |
| stress | | | | | | NO: 491 | NO: 492 |
| Abiotic | Stress | ZmPHR1 | 100382084 | protein | Increase | SEQ ID | SEQ ID |
| stress | response | | | | | NO: 493 | NO: 494 |
| Architecture | fertilization | Barren stalk | 542186 | protein | Increase | SEQ ID | SEQ ID |
| | | 1 (Zmba1) | | | | NO: 497 | NO: 498 |
| Architecture | fertilization | Barren | 100284398 | protein | Increase | SEQ ID | SEQ ID |
| | | inflorescence | | | | NO: 499 | NO: 500 |
| | | 4(Bif4) | | | | | |
| Architecture | Flowering | Indeterminate | 541693 | protein | Increase/ | SEQ ID | SEQ ID |
| | time/architecture | 1 (ID1) | | | Decrease | NO: 501 | NO: 502 |
| Architecture | Flowering | ZMM4 | 542041 | protein | Increase/ | SEQ ID | SEQ ID |
| | time/architecture | | | | Decrease | NO: 503 | NO: 504 |
| Architecture | Flowering | supressor of | 542042 | protein | Increase/ | SEQ ID | SEQ ID |
| | time/architecture | overexpression | | | Decrease | NO: 505 | NO: 506 |
| | | of constans1 | | | | | |
| | | (SOC1) | | | | | |
| Architecture | Flowering | Zfl1 (LEAFY | 542098 | protein | Increase/ | SEQ ID | SEQ ID |
| | time/architecture | homolog) | | | Decrease | NO: 507 | NO: 508 |
| Architecture | Flowering | Zag1 | 542244 | protein | Increase/ | SEQ ID | SEQ ID |
| | time/architecture | (agamous) | | | Decrease | NO: 509 | NO: 510 |
| Architecture | Flowering | Zag2 | 542325 | protein | Increase/ | SEQ ID | SEQ ID |
| | time/architecture | (Agamous) | | | Decrease | NO: 511 | NO: 512 |
| Architecture | Flowering | DLF1(Delayed | 100037791 | protein | Increase/ | SEQ ID | SEQ ID |
| | time/architecture | flowering 1) | | | Decrease | NO: 513 | NO: 514 |
| Architecture | Flowering | ZCN7 | 100127518 | protein | Increase/ | SEQ ID | SEQ ID |
| | time/architecture | | | | Decrease | NO: 515 | NO: 516 |
| Architecture | Flowering | ZCN8 (Zia Mays | 100127519 | protein | Increase/ | SEQ ID | SEQ ID |
| | time/architecture | Centroradiales8) | | | Decrease | NO: 517 | NO: 518 |
| Architecture | Flowering | RAP2.7 | 103635944 | protein | Increase/ | SEQ ID | SEQ ID |
| | time/architecture | | | | Decrease | NO: 519 | NO: 520 |
| Architecture | Flowering | Zf12 (LEAFY | 103645994 | protein | Increase/ | SEQ ID | SEQ ID |
| | time/architecture | homolog) | | | Decrease | NO: 521 | NO: 522 |
| Architecture | Growth | ZmPTR1 | 100280282 | protein | Increase | SEQ ID | SEQ ID |
| | | | | | | NO: 523 | NO: 524 |
| Architecture | Inflorescence | Zmra3 | 732774 | protein | Increase/ | SEQ ID | SEQ ID |
| | architecture | | | | Decrease | NO: 525 | NO: 526 |
| Architecture | Inflorescence | Zmra2 | 100193308 | protein | Increase | SEQ ID | SEQ ID |
| | architecture | | | | | NO: 527 | NO: 528 |
| Architecture | Lodging | BrittleStalk2 | 778435 | protein | Increase | SEQ ID | SEQ ID |
| | resistance | | | | | NO: 529 | NO: 530 |
| Architecture | Lodging | Caffeic acid | 100125646 | protein | Increase | SEQ ID | SEQ ID |
| | resistance | 3-O- | | | | NO: 531 | NO: 532 |
| | | methyltransferase | | | | | |
| Architecture | Lodging | Strongculm2b | 103629662 | protein | Increase | SEQ ID | SEQ ID |
| | resistance | | | | | NO: 533 | NO: 534 |
| Architecture | Lodging | Strongculm2a | 103638875 | protein | Increase | SEQ ID | SEQ ID |
| | resistance | | | | | NO: 535 | NO: 536 |
| Architecture | other | Cenh3 | 542500 | protein | AA change | SEQ ID | SEQ ID |
| | | | | | | NO: 537 | NO: 538 |
| Architecture | Root | ZmPP2AA1 | 732740 | protein | Increase | SEQ ID | SEQ ID |
| | architecture | | | | | NO: 539 | NO: 540 |
| Architecture | Root | rootless1 | 100101548 | protein | Increase | SEQ ID | SEQ ID |
| | Architecture | | | | | NO: 541 | NO: 542 |
| Architecture | Root | Rul1 (Rum 1 | 100193994 | protein | Increase/ | SEQ ID | SEQ ID |
| | Architecture | like) | | | Decrease | NO: 543 | NO: 544 |
| Architecture | Root | Brevis | 100501926 | protein | Increase | SEQ ID | SEQ ID |
| | Architecture | Radix(BRX) | | | | NO: 545 | NO: 546 |
| Architecture | Root | rth1 (root | 100502100 | protein | Increase | SEQ ID | SEQ ID |
| | Architecture | hair) | | | | NO: 547 | NO: 548 |
| Architecture | Root | Wox11 | 103633577 | protein | Increase | SEQ ID | SEQ ID |
| | Architecture | | | | | NO: 549 | NO: 550 |
| Architecture | Root | RTCL(RTCS | 100101549 | protein | Increase | SEQ ID | SEQ ID |
| | Architecture | like) | | | | NO: 551 | NO: 552 |
| Architecture | shoot | tb1 | 103643875 | protein | Increase/ | SEQ ID | SEQ ID |
| | Architecture | | | | Decrease | NO: 553 | NO: 554 |
| Architecture | shoot | knotted1 | 542391 | protein | Increase | SEQ ID | SEQ ID |
| | Architecture | (KN1) | | | | NO: 555 | NO: 556 |
| Architecture | shoot | tasselsheath4 | 542666 | protein | Increase | SEQ ID | SEQ ID |
| | Architecture | (tsh4) | | | | NO: 557 | NO: 558 |
| Architecture | shoot | fea2 | 542675 | protein | Decrease | SEQ ID | SEQ ID |
| | Architecture | | | | | NO: 559 | NO: 560 |
| Architecture | Shoot | Ga20ox | 778427 | protein | Increase/ | SEQ ID | SEQ ID |
| | Architecture | | | | Decrease | NO: 561 | NO: 562 |
| Architecture | shoot | MIR156 | 100126884 | microRNA | Increase | SEQ ID | |
| | Architecture | | | | | NO: 563 | |
| Architecture | shoot | unbranched | 541996 | protein | Increase/ | SEQ ID | SEQ ID |
| | Architecture | 2(ub2) | | | Decrease | NO: 565 | NO: 566 |
| Architecture | Shoot | RAMOSA1 | 100276104 | protein | Increase | SEQ ID | SEQ ID |
| | architecture | | | | | NO: 567 | NO: 568 |
| Architecture | Shoot | miRNA172 | 100278541 | microRNA | Increase/ | SEQ ID | |
| | architecture | | | | Decrease | NO: 569 | |
| Architecture | Shoot | drooping leaf | 100282346 | protein | Increase/ | SEQ ID | SEQ ID |
| | Architecture | (drl1) | | | Decrease | NO: 571 | NO: 572 |
| Architecture | shoot | compact | 100284718 | protein | Decrease | SEQ ID | SEQ ID |
| | Architecture | plant2 (ct2) | | | | NO: 573 | NO: 574 |
| Architecture | Shoot | brachytic | 100384057 | protein | Increase/ | SEQ ID | SEQ ID |
| | Architecture | (br2)(pgp1) | | | Decrease | NO: 575 | NO: 576 |
| Architecture | Shoot | drooping leaf | 100502185 | protein | Increase/ | SEQ ID | SEQ ID |
| | Architecture | (drl2) | | | Decrease | NO: 577 | NO: 578 |
| Architecture | Shoot | thick tassel | 103626458 | protein | Decrease | SEQ ID | SEQ ID |
| | Architecture | dwarf1 (td1) | | | | NO: 579 | NO: 580 |
| Architecture | Shoot | PLASTOCH | 100126887 | protein | Increase | SEQ ID | SEQ ID |
| | Architecture | RON1 | | | | NO: 581 | NO: 582 |
| | | (PLA1) | | | | | |
| Architecture | Shoot | FON2-like | 103646325 | protein | Increase/ | SEQ ID | SEQ ID |
| | Architecture | CLE protein | | | Decrease | NO: 583 | NO: 584 |
| | | 1 (ZmFCP1) | | | | | |
| Architecture | Shoot | tga1 | 103653213 | protein | Decrease | SEQ ID | SEQ ID |
| | Architecture | | | | | NO: 585 | NO: 586 |
| Architecture | shoot | unbranched 3 | 103654498 | protein | Decrease | SEQ ID | SEQ ID |
| | Architecture | (ub3) | | | | NO: 587 | NO: 588 |
| Architecture | Shoot | fasciated ear | 107403067 | protein | Decrease | SEQ ID | SEQ ID |
| | Architecture | 4 (fea4, | | | | NO: 589 | NO: 590 |
| | | PERIANTHI | | | | | |
| | | A homolog) | | | | | |
| Architecture | Shoot | WUS2 | 100037787 | protein | Increase | SEQ ID | SEQ ID |
| | Architecture | (wuschel2) | | | | NO: 591 | NO: 592 |
| | (meristem) | | | | | | |
| Architecture | Shoot | BBM | 100281144 | protein | Increase | SEQ ID | SEQ ID |
| | Architecture | (babyboom) | | | | NO: 593 | NO: 594 |
| | (meristem) | | | | | | |
| Architecture | shoot | fea3 | 100216564 | protein | Decrease | SEQ ID | SEQ ID |
| | Architecture | | | | | NO: 595 | NO: 596 |
| Architecture | Yield | ZmARGOS1 | 100274970 | protein | Increase | SEQ ID | SEQ ID |
| | | | | | | NO: 597 | NO: 598 |
| Architecture | Yield | ZmCNR1 | 100284956 | protein | Decrease | SEQ ID | SEQ ID |
| | | | | | | NO: 599 | NO: 600 |
| Biotic Stress | Disease | GST23 | 541845 | protein | AA change | SEQ ID | SEQ ID |
| | Resistance | | | | | NO: 601 | NO: 602 |
| Biotic Stress | Disease | ZmAE3 | 541993 | protein | Increase | SEQ ID | SEQ ID |
| | Resistance | | | | | NO: 603 | NO: 604 |
| Biotic Stress | Disease | Zm ERF1 | 542184 | protein | Increase | SEQ ID | SEQ ID |
| | Resistance | | | | | NO: 605 | NO: 606 |
| Biotic Stress | Disease | Zm LOX3 | 103635903 | protein | Increase | SEQ ID | SEQ ID |
| | Resistance | | | | | NO: 607 | NO: 608 |
| Biotic Stress | Disease | ZmEsr6 | 606439 | protein | Increase | SEQ ID | SEQ ID |
| | Resistance | | | | | NO: 609 | NO: 610 |
| Biotic Stress | Disease | Zm Trxh | 606450 | protein | Increase + | SEQ ID | SEQ ID |
| | Resistance | | | | AA change | NO: 611 | NO: 612 |
| Biotic Stress | Disease | Hm1 | 732845 | protein | Increase | SEQ ID | SEQ ID |
| | Resistance | | | | | NO: 613 | NO: 614 |
| Biotic Stress | Disease | ZmWRKY53 | 100147737 | protein | Increase | SEQ ID | SEQ ID |
| | Resistance | | | | | NO: 615 | NO: 616 |
| Biotic Stress | Disease | PRms | 100272820 | protein | Increase | SEQ ID | SEQ ID |
| | Resistance | | | | | NO: 617 | NO: 618 |
| Biotic Stress | Disease | Zm PR1 | 100273383 | protein | Increase | SEQ ID | SEQ ID |
| | Resistance | | | | | NO: 619 | NO: 620 |
| Biotic Stress | Disease | RP1-D | 100274731 | protein | Increase | SEQ ID | SEQ ID |
| | Resistance | | | | | NO: 621 | NO: 622 |
| Biotic Stress | Disease | Zmpep1 from | 103645871 | protein | Increase | SEQ ID | SEQ ID |
| | Resistance | gene Zm | | | | NO: 623 | NO: 624 |
| | | PROPEP1 | | | | | |
| Biotic Stress | Disease | Remorin Zm | 100277367 | protein | Increase | SEQ ID | SEQ ID |
| | Resistance | REM6.3 | | | | NO: 625 | NO: 626 |
| Biotic Stress | Disease | Zm NPR1 | 100281196 | protein | Increase | SEQ ID | SEQ ID |
| | Resistance | | | | | NO: 627 | NO: 628 |
| Biotic Stress | Disease | ZmWRKY67 | 100285526 | protein | Increase | SEQ ID | SEQ ID |
| | Resistance | | | | | NO: 629 | NO: 630 |
| Biotic Stress | Disease | ZmWAK | 100304375 | protein | Increase | SEQ ID | SEQ ID |
| | Resistance | | | | | NO: 631 | NO: 632 |
| Biotic Stress | Disease | Pan1 | 100501323 | protein | Increase | SEQ ID | SEQ ID |
| | Resistance | | | | | NO: 633 | NO: 634 |
| Biotic Stress | Disease | Rxo1 (PIC | 103629015 | protein | Increase | SEQ ID | SEQ ID |
| | Resistance | 19 paralog 1) | | | | NO: 635 | NO: 636 |
| Biotic Stress | Disease | ZmWAK- | 103636194 | protein | AA change | SEQ ID | SEQ ID |
| | Resistance | RLK1 (Htn1) | | | | NO: 637 | NO: 638 |
| Biotic Stress | Disease | ZmWRKY19 | 103651065 | protein | Increase | SEQ ID | SEQ ID |
| | Resistance | | | | | NO: 639 | NO: 640 |
| Biotic Stress | Disease | Rcg1 | — | protein | Increase | | SEQ ID |
| | Resistance | | | | | | NO: 642 |
| Biotic Stress | Insect | ZmP1 | 542272 | protein | Increase | SEQ ID | SEQ ID |
| | resistance | | | | | NO: 643 | NO: 644 |
| Biotic Stress | insect | mpi | 542408 | protein | Increase | SEQ ID | SEQ ID |
| | Resistance | | | | | NO: 645 | NO: 646 |
| Biotic Stress | insect | proteinase, | 542561 | protein | Increase | SEQ ID | SEQ ID |
| | Resistance | mir1 | | | | NO: 647 | NO: 648 |
| Biotic Stress | Population | COP1 | 100286122 | protein | Increase | SEQ ID | SEQ ID |
| | density/stress/ | | | | | NO: 649 | NO: 650 |
| | shading | | | | | | |
| Biotic Stress | Population | PhyB2 | 100381811 | protein | Decrease | SEQ ID | SEQ ID |
| | density/stress/ | | | | | NO: 651 | NO: 652 |
| | shading | | | | | | |
| Biotic Stress | Population | PhyB1 | 100383702 | protein | Decrease | SEQ ID | SEQ ID |
| | density/stress/ | | | | | NO: 653 | NO: 654 |
| | shading | | | | | | |
| Photosynthesis | photosynthesis | PsbS | 542126 | protein | Increase | SEQ ID | SEQ ID |
| | | | | | | NO: 655 | NO: 656 |
| Photosynthesis | photosynthesis | ZEP | 100280949 | protein | Increase | SEQ ID | SEQ ID |
| | | | | | | NO: 657 | NO: 658 |
| Photosynthesis | photosynthesis | VDE | 100281366 | protein | Increase | SEQ ID | SEQ ID |
| | | | | | | NO: 659 | NO: 660 |
| Photosynthesis | photosynthesis | sedoheptulose-1,7- | 100282017 | protein | Increase | SEQ ID | SEQ ID |
| | | bisphosphatase(SBPase) | | | | NO: 661 | NO: 662 |
| Photosynthesis | photosynthesis | Fbpase; | 100284739 | protein | Increase | SEQ ID | SEQ ID |
| | | fructose-1,6- | | | | NO: 663 | NO: 664 |
| | | bisphosphatase | | | | | |
| Photosynthesis | Respiration | Alternative | 542074 | protein | Decrease | SEQ ID | SEQ ID |
| | | oxidase AOX | | | | NO: 665 | NO: 666 |
| Resource | Biomass | ZmDof1 | 100283759 | protein | Increase | SEQ ID | SEQ ID |
| Partitioning | | | | | | NO: 667 | NO: 668 |
| Resource | Biomass | OsPSTOL1 | 103653161 | protein | Increase | SEQ ID | SEQ ID |
| Partitioning | | | | | | NO: 669 | NO: 670 |
| Resource | Biomass | AlaAT | 100282849 | protein | Increase | SEQ ID | SEQ ID |
| Partitioning | (seed weight) | | | | | NO: 671 | NO: 672 |
| Resource | Biomass | ZmNRT2.2 | 606442 | protein | Increase | SEQ ID | SEQ ID |
| Partitioning | (stress | | | | | NO: 673 | NO: 674 |
| | response) | | | | | | |
| Resource | Drydown rate | esp5 | 542280 | protein | Decrease | SEQ ID | SEQ ID |
| Partitioning | | | | | | NO: 675 | NO: 676 |
| Resource | Drydown rate | esp1 | 542384 | protein | Decrease | SEQ ID | SEQ ID |
| Partitioning | | | | | | NO: 677 | NO: 678 |
| Resource | GrainSize | ZmGW2- | 100276421 | protein | Increase/ | SEQ ID | SEQ ID |
| Partitioning | | CHR5 | | | Decrease | NO: 679 | NO: 680 |
| Resource | GrainSize | ZmGW2- | 100277474 | protein | Increase/ | SEQ ID | SEQ ID |
| Partitioning | | CHR4 | | | Decrease | NO: 681 | NO: 682 |
| Resource | Nitrogen | Gln1-3 | 542214 | protein | Increase | SEQ ID | SEQ ID |
| Partitioning | | (Gln1.3) | | | | NO: 683 | NO: 684 |
| Resource | Nitrogen | Gln1-4 | 542401 | protein | Increase | SEQ ID | SEQ ID |
| Partitioning | | (Gln1.4) | | | | NO: 685 | NO: 686 |
| Resource | Nitrogen | GS2 | CAA46724.1 | | | SEQ ID | SEQ ID |
| Partitioning | | | | | | NO: 1024 | NO: 1025 |
| Resource | Nitrogen | Asn | 542435 | protein | Increase | SEQ ID | SEQ ID |
| Partitioning | | synthetase | | | | NO: 687 | NO: 688 |
| Resource | Nitrogen | OsENOD93-1 | 100193182 | protein | Increase | SEQ ID | SEQ ID |
| Partitioning | | | | | | NO: 689 | NO: 690 |
| Resource | Nitrogen | AspAT | 100273311 | protein | Increase | SEQ ID | SEQ ID |
| Partitioning | | | | | | NO: 691 | NO: 692 |
| Resource | Nitrogen | NAD(H)- | 103636185 | protein | Increase | SEQ ID | SEQ ID |
| Partitioning | | dependent | | | | NO: 693 | NO: 694 |
| | | GOGAT | | | | | |
| Resource | Nitrogen | NAD(H)- | GRMZM2 | protein | Increase | SEQ ID | SEQ ID |
| Partitioning | | dependent | G085078 | | | NO: 1026 | NO: 1027 |
| | | GOGAT 2 | | | | | |
| Resource | Nitrogen | [SPX gene] | 100193704 | | | SEQ ID | SEQ ID |
| Partitioning | | | | | | NO: 695 | NO: 696 |
| Resource | Nitrogen | alanine | Zm00001d032984 | protein | Increase | SEQ ID | SEQ ID |
| Partitioning | | aminotransferase | | | | NO: 1028 | NO: 1029 |
| | | (AlaAT5) | | | | | |
| Resource | Oil | DGAT1 | 103629820 | protein | AA change | SEQ ID | SEQ ID |
| Partitioning | | | | | | NO: 697 | NO: 698 |
| Resource | Oil body | obap1 | 100193701 | protein | Increase | SEQ ID | SEQ ID |
| Partitioning | accumulation | | | | | NO: 699 | NO: 700 |
| Resource | Protein | pbf1 | 542353 | protein | Increase | SEQ ID | SEQ ID |
| Partitioning | | | | | | NO: 701 | NO: 702 |
| Resource | Protein | O2 | 542375 | protein | Decrease | SEQ ID | SEQ ID |
| Partitioning | | | | | | NO: 703 | NO: 704 |
| Resource | Protein | ZmAAP4 | 100274520 | protein | Increase | SEQ ID | SEQ ID |
| Partitioning | | (amino acid | | | | NO: 705 | NO: 706 |
| | | permease 4) | | | | | |
| Resource | Protein | ZmVAAT3 | 100383728 | protein | Increase | SEQ ID | SEQ ID |
| Partitioning | | (Vacuolar | | | | NO: 707 | NO: 708 |
| | | amino acid | | | | | |
| | | transporter) | | | | | |
| Resource | provitamin A | crtRB1 | 732825 | protein | Decrease | SEQ ID | SEQ ID |
| Partitioning | | | | | | NO: 709 | NO: 710 |
| Resource | Seed | ZmMRP1 | 103635903 | protein | Increase | SEQ ID | SEQ ID |
| Partitioning | composition | | | | | NO: 711 | NO: 712 |
| Resource | Seed | SWEET4c | 100273706 | protein | Increase | SEQ ID | SEQ ID |
| Partitioning | composition | | | | | NO: 713 | NO: 714 |
| Resource | seed filling - | ZmDA1 | 100191921 | protein | Decrease or | SEQ ID | SEQ ID |
| Partitioning | sugar | | | | AA change | NO: 715 | NO: 716 |
| | nitrogen | | | | | | |
| | transport | | | | | | |
| Resource | seed filling - | ZmDAR1 | 100501585 | protein | Decrease or | SEQ ID | SEQ ID |
| Partitioning | sugar | | | | AA change | NO: 717 | NO: 718 |
| | nitrogen | | | | | | |
| | transport | | | | | | |
| Resource | starch | dull1 | 541657 | protein | Increase | SEQ ID | SEQ ID |
| Partitioning | | | | | | NO: 719 | NO: 720 |
| Resource | starch | brittle | 541902 | protein | Increase | SEQ ID | SEQ ID |
| Partitioning | | endosperm bt2 | | | | NO: 721 | NO: 722 |
| Resource | Starch | ae1 | 541992 | protein | Increase/ | SEQ ID | SEQ ID |
| Partitioning | | | | | Decrease | NO: 723 | NO: 724 |
| Resource | Starch | Betl3 | 542003 | protein | Increase | SEQ ID | SEQ ID |
| Partitioning | | | | | | NO: 725 | NO: 726 |
| Resource | Starch | Betl4 | 542004 | protein | Increase | SEQ ID | SEQ ID |
| Partitioning | | | | | | NO: 727 | NO: 728 |
| Resource | Starch | sus1 | 542247 | protein | Increase | SEQ ID | SEQ ID |
| Partitioning | | | | | | NO: 729 | NO: 730 |
| Resource | starch | sbe1 | 542315 | protein | Increase/ | SEQ ID | SEQ ID |
| Partitioning | | | | | Decrease | NO: 731 | NO: 732 |
| Resource | starch | sugary 1 | 542318 | protein | Increase/ | SEQ ID | SEQ ID |
| Partitioning | | | | | Decrease | NO: 733 | NO: 734 |
| Resource | starch | shrunken 1 | 542365 | protein | Increase | SEQ ID | SEQ ID |
| Partitioning | | | | | | NO: 735 | NO: 736 |
| Resource | Starch | Esr2 | 542448 | protein | Increase | SEQ ID | SEQ ID |
| Partitioning | | | | | | NO: 737 | NO: 738 |
| Resource | Starch | Betl1 | 542477 | protein | Increase | SEQ ID | SEQ ID |
| Partitioning | | | | | | NO: 739 | NO: 740 |
| resource | Starch | Betl2 | 542570 | protein | Increase | SEQ ID | SEQ ID |
| Partitioning | | | | | | NO: 741 | NO: 742 |
| Resource | starch | Miniature1; | 542590 | protein | Increase | SEQ ID | SEQ ID |
| Partitioning | | Mn1 | | | | NO: 743 | NO: 744 |
| Resource | starch | shrunken 2 | 542761 | protein | Increase | SEQ ID | SEQ ID |
| Partitioning | | | | | | NO: 745 | NO: 746 |
| Resource | Starch | bt1 | 732804 | protein | Increase | SEQ ID | SEQ ID |
| Partitioning | | | | | | NO: 747 | NO: 748 |
| Resource | Starch | Esr1 | 100037781 | protein | Increase | SEQ ID | SEQ ID |
| Partitioning | | | | | | NO: 749 | NO: 750 |
| Resource | starch | 6-phospho- | 100191851 | protein | Increase | SEQ ID | SEQ ID |
| Partitioning | | fructokinase | | | | NO: 751 | NO: 752 |
| Resource | Starch | APS1 | 542295 | protein | Increase | SEQ ID | SEQ ID |
| Partitioning | | | | | | NO: 753 | NO: 754 |
| Resource | starch | se1 | 103648177 | protein | Increase/ | SEQ ID | SEQ ID |
| Partitioning | | | | | Decrease | NO: 755 | NO: 756 |
| Resource | Starch | wx1 | 109942318 | protein | Increase | SEQ ID | SEQ ID |
| Partitioning | | | | | | NO: 757 | NO: 758 |
| Resource | Starch | Esr3 | 109943596 | protein | Increase | SEQ ID | SEQ ID |
| Partitioning | | | | | | NO: 759 | NO: 760 |
| Resource | Starch | Zm | — | protein | Increase | | SEQ ID |
| Partitioning | | INVINH1 | | | | | NO: 762 |
| Abiotic | Drought | ZmPYL- | | protein | Increase | SEQ ID | SEQ ID |
| stress | tolerance | 8/ZmPYL-E | | | | NO: 1007 | NO: 1008 |
| Abiotic | Drought | ZmARGOS1 | 100274970 | protein | Increase | SEQ ID | SEQ ID |
| stress | tolerance | | | | | NO: 597 | NO: 598 |
| Abiotic | Drought | ZmPIF3 | 100279991 | protein | Increase | SEQ ID | SEQ ID |
| stress | tolerance | | | | | NO: 1031 | NO: 1032 |
| Abiotic | Drought | ZmVPP1 | | protein | Increase | SEQ ID | SEQ ID |
| stress | tolerance | | | | | NO: 1033 | NO: 1034 |
| Abiotic | Drought | ZmPIP2; 5 | | protein | Increase | SEQ ID | SEQ ID |
| stress | tolerance | | | | | NO: 1035 | NO: 1036 |
| Abiotic | Drought | ZmNF-YB16 | | protein | Increase | SEQ ID | SEQ ID |
| stress | tolerance | | | | | NO: 1037 | NO: 1038 |
| Abiotic | Drought | ZmEPF1a | | protein | Increase | SEQ ID | SEQ ID |
| stress | tolerance | | | | | NO: 1039 | NO: 1040 |
| Abiotic | Drought | ZmEPF1b | | protein | Increase | SEQ ID | SEQ ID |
| stress | tolerance | | | | | NO: 1041 | NO: 1042 |
| Resource | Nitrogen | ZmSNAC1 | 100170665 | protein | Increase | SEQ ID | SEQ ID |
| Partitioning | | | | | | NO: 451 | NO: 452 |
| Resource | Nitrogen | Zm NPL5 | | protein | Increase | SEQ ID | SEQ ID |
| Partitioning | | | | | | NO: 1043 | NO: 1044 |
| Resource | Nitrogen | ZmNAC60 | | protein | Increase | SEQ ID | SEQ ID |
| Partitioning | | | | | | NO: 1045 | NO: 1046 |

TABLE 24

| Type of regulation | Name of element | Sequence | SEQ ID |
|---|---|---|---|
| regulatory control | ABFs binding site | CACGTGGC | SEQ ID |
| by TF | motif | | NO: 763 |
| regulatory control | ABRE binding site | (C/T)ACGTGGC | SEQ ID |
| by TF | motif | | NO: 764 |
| regulatory control | ABRE-like binding | (C/G/T)ACGTG(G/T)(A/C) | SEQ ID |
| by TF | site motif | | NO: 765 |
| regulatory control | ACE promoter | GACACGTAGA | SEQ ID |
| by TF | motif | | NO: 766 |
| regulatory control | AG binding site | TT(A/G/T)CC(A/T)(A/T)(A/T) | SEQ ID |
| by TF | motif | (A/T)(A/T)(A/T)GG(A/C/T) | NO: 767 |
| regulatory control | AG binding site | CCATTTTTAGT | SEQ ID |
| by TF | in AP3 | | NO: 768 |
| regulatory control | AG binding site | CCATTTTTGG | SEQ ID |
| by TF | in SUP | | NO: 769 |
| regulatory control | AGL1 binding site | NTT(A/G/T)CC(A/T)(A/T)(A/T)(A/T) | SEQ ID |
| by TF | motif | NNGG(A/T)AAN | NO: 770 |
| regulatory control | AGL2 binding site | NN(A/T)NCCA(A/T)(A/T)(A/T)(A/T) | SEQ ID |
| by TF | motif | T(A/G)G(A/T)(A/T)AN | NO: 771 |
| regulatory control | AGL3 binding site | TT(A/T)C(C/T)A(A/T)(A/T)(A/T) | SEQ ID |
| by TF | motif | (A/T)T(A/G)G(A/T)AA | NO: 772 |
| regulatory control | AP1 binding site | CCATTTTTAG | SEQ ID |
| by TF | in AP3 | | NO: 773 |
| regulatory control | AP1 binding site | CCATTTTTGG | SEQ ID |
| by TF | in SUP | | NO: 774 |
| regulatory control | ARF binding site | TGTCTC | SEQ ID |
| by TF | motif | | NO: 775 |
| regulatory control | ARF1 binding site | TGTCTC | SEQ ID |
| by TF | motif | | NO: 776 |
| regulatory control | ATHB1 binding site | CAAT(A/T)ATTG | SEQ ID |
| by TF | motif | | NO: 777 |
| regulatory control | ATHB2 binding site | CAAT(C/G)ATTG | SEQ ID |
| by TF | motif | | NO: 778 |
| regulatory control | ATHB5 binding site | CAATNATTG | SEQ ID |
| by TF | motif | | NO: 779 |
| regulatory control | ATHB6 binding site | CAATTATTA | SEQ ID |
| by TF | motif | | NO: 780 |
| regulatory control | AtMYB2 binding | CTAACCA | SEQ ID |
| by TF | site in RD22 | | NO: 781 |
| regulatory control | AtMYC2 binding | CACATG | SEQ ID |
| by TF | site in RD22 | | NO: 782 |
| regulatory control | Box Il promoter | GGTTAA | SEQ ID |
| by TF | motif | | NO: 783 |
| regulatory control | CArG promoter | CC(A/T)(A/T)(A/T)(A/T)(A/T)(A/T)GG | SEQ ID |
| by TF | motif | | NO: 784 |
| regulatory control | CArG1 motif in AP3 | GTTTACATAAATGGAAAA | SEQ ID |
| by TF | | | NO: 785 |
| regulatory control | CArG2 motif in AP3 | CTTACCTTTCATGGATTA | SEQ ID |
| by TF | | | NO: 786 |
| regulatory control | CArG3 motif in AP3 | CTTTCCATTTITTAGTAAC | SEQ ID |
| by TF | | | NO: 787 |
| regulatory control | CBF1 binding site | TGGCCGAC | SEQ ID |
| by TF | in cor15a | | NO: 788 |
| regulatory control | CBF2 binding site | CCACGTGG | SEQ ID |
| by TF | motif | | NO: 789 |
| regulatory control | CCA1 binding site | AA(A/C)AATCT | SEQ ID |
| by TF | motif | | NO: 790 |
| regulatory control | CCA1 motif1 | AAACAATCTA | SEQ ID |
| by TF | binding site in | | NO: 791 |
| | CAB1 | | |
| regulatory control | CCA1 motif2 | AAAAAAAATCTATGA | SEQ ID |
| by TF | binding site in | | NO: 792 |
| | CAB1 | | |
| regulatory control | DPBF1 & 2 binding | ACACNNG | SEQ ID |
| by TF | site motif | | NO: 793 |
| regulatory control | DRE promoter | TACCGACAT | SEQ ID |
| by TF | motif | | NO: 794 |
| regulatory control | DREB1 & 2 binding | TACCGACAT | SEQ ID |
| by TF | site in rd29a | | NO: 795 |
| regulatory control | DRE-like promoter | (A/G/T)(A/G)CCGACN(A/T) | SEQ ID |
| by TF | motif | | NO: 796 |
| regulatory control | E2F binding site | TTTCCCGC | SEQ ID |
| by TF | motif | | NO: 797 |
| regulatory control | E2F/DP binding | TTTCCCGC | SEQ ID |
| by TF | site in AtCDC6 | | NO: 798 |
| regulatory control | E2F-varient | TCTCCCGCC | SEQ ID |
| by TF | binding site motif | | NO: 799 |
| regulatory control | EIL1 binding site | TTCAAGGGGGCATGTATCTTGAA | SEQ ID |
| by TF | in ERF1 | | NO: 800 |
| regulatory control | EIL2 binding site | TTCAAGGGGGCATGTATCTTGAA | SEQ ID |
| by TF | in ERF1 | | NO: 801 |
| regulatory control | EIL3 binding site | TTCAAGGGGGCATGTATCTTGAA | SEQ ID |
| by TF | in ERF1 | | NO: 802 |
| regulatory control | EIN3 binding site | GGATTCAAGGGGGCATGTATCTTGAATCC | SEQ ID |
| by TF | in ERF1 | | NO: 803 |
| regulatory control | ERE promoter | TAAGAGCCGCC | SEQ ID |
| by TF | motif | | NO: 804 |
| regulatory control | ERF1 binding site | GCCGCC | SEQ ID |
| by TF | in AtCHI-B | | NO: 805 |
| regulatory control | EveningElement | AAAATATCT | SEQ ID |
| by TF | promoter motif | | NO: 806 |
| regulatory control | GATA promoter | (A/T)GATA(G/A) | SEQ ID |
| by TF | motif | | NO: 807 |
| regulatory control | GBF1/2/3 binding | CCACGTGG | SEQ ID |
| by TF | site in ADH1 | | NO: 808 |
| regulatory control | G-box promoter | CACGTG | SEQ ID |
| by TF | motif | | NO: 809 |
| regulatory control | GCC-box promoter | GCCGCC | SEQ ID |
| by TF | motif | | NO: 810 |
| regulatory control | GT promoter motif | TGTGTGGTTAATATG | SEQ ID |
| by TF | | | NO: 811 |
| regulatory control | Hexamer promoter | CCGTCG | SEQ ID |
| by TF | motif | | NO: 812 |
| regulatory control | HSEs binding site | AGAANNTTCT | SEQ ID |
| by TF | motif | | NO: 813 |
| regulatory control | Ibox promoter | GATAAG | SEQ ID |
| by TF | motif | | NO: 814 |
| regulatory control | JASE1 motif in | CGTCAATGAA | SEQ ID |
| by TF | OPR1 | | NO: 815 |
| regulatory control | JASE2 motif in | CATACGTCGTCAA | SEQ ID |
| by TF | OPR2 | | NO: 816 |
| regulatory control | L1-box promoter | TAAATG(C/T)A | SEQ ID |
| by TF | motif | | NO: 817 |
| regulatory control | LS5 promoter motif | ACGTCATAGA | SEQ ID |
| by TF | | | NO: 818 |
| regulatory control | LS7 promoter motif | TCTACGTCAC | SEQ ID |
| by TF | | | NO: 819 |
| regulatory control | LTRE promoter | ACCGACA | SEQ ID |
| by TF | motif | | NO: 820 |
| regulatory control | MRE motif in CHS | TCTAACCTACCA | SEQ ID |
| by TF | | | NO: 821 |
| regulatory control | MYB binding site | (A/C)ACC(A/T)A(A/C)C | SEQ ID |
| by TF | promoter | | NO: 822 |
| regulatory control | MYB1 binding site | (A/C)TCC(A/T)ACC | SEQ ID |
| by TF | motif | | NO: 823 |
| regulatory control | MYB2 binding site | TAACT(G/C)GTT | SEQ ID |
| by TF | motif | | NO: 824 |
| regulatory control | MYB3 binding site | TAACTAAC | SEQ ID |
| by TF | motif | | NO: 825 |
| regulatory control | MYB4 binding site | A(A/C)C(A/T)A(A/C)C | SEQ ID |
| by TF | motif | | NO: 826 |
| regulatory control | Nonamer promoter | AGATCGACG | SEQ ID |
| by TF | motif | | NO: 827 |
| regulatory control | OBF4,5 binding | ATCTTATGTCATTGATGACGACCTCC | SEQ ID |
| by TF | site in GST6 | | NO: 828 |
| regulatory control | OBP-1,4,5 binding | TACACTTTTGG | SEQ ID |
| by TF | site in GST6 | | NO: 829 |
| regulatory control | OCS promoter | TGACG(C/T)AAG(C/G)(A/G)(A/C)T(G/T) | SEQ ID |
| by TF | motif | ACG(C/T)(A/C)(A/C) | NO: 830 |
| regulatory control | octamer promoter | CGCGGATC | SEQ ID |
| by TF | motif | | NO: 831 |
| regulatory control | PI promoter motif | GTGATCAC | SEQ ID |
| by TF | | | NO: 832 |
| regulatory control | Pll promoter motif | TTGGTTTTGATCAAAACCAA | SEQ ID |
| by TF | | | NO: 833 |
| regulatory control | PRHA binding site | TAATTGACTCAATTA | SEQ ID |
| by TF | in PAL1 | | NO: 834 |
| regulatory control | RAV1-A binding | CAACA | SEQ ID |
| by TF | site motif | | NO: 835 |
| regulatory control | RAV1-B binding | CACCTG | SEQ ID |
| by TF | site motif | | NO: 836 |
| regulatory control | RY-repeat | CATGCATG | SEQ ID |
| by TF | promoter motif | | NO: 837 |
| regulatory control | SBP-box promoter | TNCGTACAA | SEQ ID |
| by TF | motif | | NO: 838 |
| regulatory control | T-box promoter | ACTTTG | SEQ ID |
| by TF | motif | | NO: 839 |
| regulatory control | TEF-box promoter | AGGGGCATAATGGTAA | SEQ ID |
| by TF | motif | | NO: 840 |
| regulatory control | TELO-box promoter | AAACCCTAA | SEQ ID |
| by TF | motif | | NO: 841 |
| regulatory control | TGA1 binding site | TGACGTGG | SEQ ID |
| by TF | motif | | NO: 842 |
| regulatory control | W-box promoter | TTGAC | SEQ ID |
| by TF | motif | | NO: 843 |
| regulatory control | Z-box promoter | ATACGTGT | SEQ ID |
| by TF | motif | | NO: 844 |
| regulatory control | AG binding site in | AAAACAGAATAGGAAA | SEQ ID |
| by TF | SPL/NOZ | | NO: 845 |
| regulatory control | Bellringer/ | AAATTAAA | SEQ ID |
| by TF | replumless/ | | NO: 846 |
| | pennywise | | |
| | binding site IN AG | | |
| regulatory control | Bellringer/ | AAATTAGT | SEQ ID |
| by TF | replumless/ | | NO: 847 |
| | pennywise | | |
| | binding site 2 | | |
| | in AG | | |
| regulatory control | Bellringer/ | ACTAATTT | SEQ ID |
| by TF | replumless/ | | NO: 848 |
| | pennywise | | |
| | binding site 3 | | |
| | in AG | | |
| regulatory control | AGL15 binding site | CCAATTTAATGG | SEQ ID |
| by TF | in AtGA2ox6 | | NO: 849 |
| regulatory control | ATB2/AtbZIP53/Atb | ACTCAT | SEQ ID |
| by TF | ZIP44/GBF5 | | NO: 850 |
| | binding site in | | |
| | ProDH | | |
| regulatory control | LFY binding site | CTTAAACCCTAGGGGTAAT | SEQ ID |
| by TF | in AP3 | | NO: 851 |
| regulatory control | SORLREP1 | TT(A/T)TACTAGT | SEQ ID |
| by TF | | | NO: 852 |
| regulatory control | SORLREP2 | ATAAAACGT | SEQ ID |
| by TF | | | NO: 853 |
| regulatory control | SORLREP3 | TGTATATAT | SEQ ID |
| by TF | | | NO: 854 |
| regulatory control | SORLREP4 | CTCCTAATT | SEQ ID |
| by TF | | | NO: 855 |
| regulatory control | SORLREP5 | TTGCATGACT | SEQ ID |
| by TF | | | NO: 856 |
| regulatory control | SORLIP1 | AGCCAC | SEQ ID |
| by TF | | | NO: 857 |
| regulatory control | SORLIP2 | GGGCC | SEQ ID |
| by TF | | | NO: 858 |
| regulatory control | SORLIP3 | CTCAAGTGA | SEQ ID |
| by TF | | | NO: 859 |
| regulatory control | SORLIP4 | GTATGATGG | SEQ ID |
| by TF | | | NO: 860 |
| regulatory control | SORLIP5 | GAGTGAG | SEQ ID |
| by TF | | | NO: 861 |
| regulatory control | ABFs binding site | CACGTGGC | SEQ ID |
| by TF | motif | | NO: 862 |
| down | Ndel restriction | GTTTAATTGAGTTGTCATATGTTAATAACGGTAT | SEQ ID |
| | site | | NO: 863 |
| down | Ndel restriction | ATACCGTTATTAACATATGACAACTCAATTAAAC | SEQ ID |
| | site | | NO: 864 |
| up (auxin | 3xDR5 auxin- | CCGACAAAAGGCCGACAAAAGGCCGACAAAAGGT | SEQ ID |
| responsive) | response element | | NO: 865 |
| up (auxin | 3xDR5 auxin- | ACCTTTTGTCGGCCTTTTGTCGGCCTTTTGTCGG | SEQ ID |
| responsive) | response element | | NO: 866 |
| up (auxin | 6xDR5 auxin- | GCCGACAAAAGGCCGACAAAAGGCCGACAAAAGG | SEQ ID |
| responsive) | responsive element | CCGACAAAAGGCCGACAAAAGGCCGACAAAAGGT | NO: 867 |
| up (auxin | 6xDR5 auxin- | ACCTTTTGTCGGCCTTTTGTCGGCCTTTTGTCGGCC | SEQ ID |
| responsive) | responsive element | TTTTGTCGGCCTTTTGTCGGCCTTTTGTCGGC | NO: 868 |
| up (auxin | 9xDR5 auxin- | CCGACAAAAGGCCGACAAAAGGCCGACAAAAGGC | SEQ ID |
| responsive) | responsive element | CGACAAAAGGCCGACAAAAGGCCGACAAAAGGCC | NO: 869 |
| | | GACAAAAGGCCGACAAAAGGCCGACAAAAGGT | |
| up (auxin | 9xDR5 auxin- | ACCTTTTGTCGGCCTTTTGTCGGCCTTTTGTCGGCC | SEQ ID |
| responsive) | responsive element | TTTTGTCGGCCTTTTGTCGGCCTTTTGTCGGCCTTT | NO: 870 |
| | | TGTCGGCCTTTTGTCGGCCTTTTGTCGG | |
| Cre recombinase | LoxP (wild-type 1) | ATAACTTCGTATAGCATACATTATACGAAGTTAT | SEQ ID |
| recognition site | | | NO: 871 |
| Cre recombinase | LoxP (wild-type 2) | ATAACTTCGTATAATGTATGCTATACGAAGTTAT | SEQ ID |
| recognition site | | | NO: 872 |
| Cre recombinase | Canonical LoxP | ATAACTTCGTATANNNTANNNTATACGAAGTTAT | SEQ ID |
| recognition site | | | NO: 873 |
| Cre recombinase | Lox 511 | ATAACTTCGTATAATGTATaCTATACGAAGTTAT | SEQ ID |
| recognition site | | | NO: 874 |
| Cre recombinase | Lox 5171 | ATAACTTCGTATAATGTgTaCTATACGAAGTTAT | SEQ ID |
| recognition site | | | NO: 875 |
| Cre recombinase | Lox 2272 | ATAACTTCGTATAAaGTATcCTATACGAAGTTAT | SEQ ID |
| recognition site | | | NO: 876 |
| Cre recombinase | M2 | ATAACTTCGTATAAgaaAccaTATACGAAGTTAT | SEQ ID |
| recognition site | | | NO: 877 |
| Cre recombinase | M3 | ATAACTTCGTATAtaaTACCATATACGAAGTTAT | SEQ ID |
| recognition site | | | NO: 878 |
| Cre recombinase | M7 | ATAACTTCGTATAAgaTAGAATATACGAAGTTAT | SEQ ID |
| recognition site | | | NO: 879 |
| Cre recombinase | M11 | ATAACTTCGTATAaGATAgaaTATACGAAGTTAT | SEQ ID |
| recognition site | | | NO: 880 |
| Cre recombinase | Lox 71 | taccgTTCGTATANNNTANNNTATACGAAGTTAT | SEQ ID |
| recognition site | | | NO: 881 |
| Cre recombinase | Lox 66 | ATAACTTCGTATANNNTANNNTATACGAAcggta | SEQ ID |
| recognition site | | | NO: 882 |
| maize ovule/early | miR156j | GTGCTCTCTCTCTTCTGTCA | SEQ ID |
| kernel transcript | recognition site | | NO: 883 |
| down-regulation | | | |
| maize ovule/early | miR156j | CTGCTCTCTCTCTTCTGTCA | SEQ ID |
| kernel transcript | recognition site | | NO: 884 |
| down-regulation | | | |
| maize ovule/early | miR156j | TTGCTTACTCTCTTCTGTCA | SEQ ID |
| kernel transcript | recognition site | | NO: 885 |
| down-regulation | | | |
| maize ovule/early | miR156j | CCGCTCTCTCTCTTCTGTCA | SEQ ID |
| kernel transcript | recognition site | | NO: 886 |
| down-regulation | | | |
| maize ovule/early | miR159c | TGGAGCTCCCTTCATTCCAAT | SEQ ID |
| kernel transcript | recognition site | | NO: 887 |
| down-regulation | | | |
| maize ovule/early | miR159c | TCGAGTTCCCTTCATTCCAAT | SEQ ID |
| kernel transcript | recognition site | | NO: 888 |
| down-regulation | | | |
| maize ovule/early | miR159c | ATGAGCTCTCTTCAAACCAAA | SEQ ID |
| kernel transcript | recognition site | | NO: 889 |
| down-regulation | | | |
| maize ovule/early | miR159c | TGGAGCTCCCTTCATTCCAAG | SEQ ID |
| kernel transcript | recognition site | | NO: 890 |
| down-regulation | | | |
| maize ovule/early | miR159c | TAGAGCTTCCTTCAAACCAAA | SEQ ID |
| kernel transcript | recognition site | | NO: 891 |
| down-regulation | | | |
| maize ovule/early | miR159c | TGGAGCTCCATTCGATCCAAA | SEQ ID |
| kernel transcript | recognition site | | NO: 892 |
| down-regulation | | | |
| maize ovule/early | miR159c | AGCAGCTCCCTTCAAACCAAA | SEQ ID |
| kernel transcript | recognition site | | NO: 893 |
| down-regulation | | | |
| maize ovule/early | miR159c | CAGAGCTCCCTTCACTCCAAT | SEQ ID |
| kernel transcript | recognition site | | NO: 894 |
| down-regulation | | | |
| maize ovule/early | miR159c | TGGAGCTCCCTTCACTCCAAT | SEQ ID |
| kernel transcript | recognition site | | NO: 895 |
| down-regulation | | | |
| maize ovule/early | miR159c | TGGAGCTCCCTTCACTCCAAG | SEQ ID |
| kernel transcript | recognition site | | NO: 896 |
| down-regulation | | | |
| maize ovule/early | miR159c | TGGAGCTCCCTTTAATCCAAT | SEQ ID |
| kernel transcript | recognition site | | NO: 897 |
| down-regulation | | | |
| maize embryo | miR166b | TTGGGATGAAGCCTGGTCCGG | SEQ ID |
| transcript down- | recognition site | | NO: 898 |
| regulation | | | |
| maize embryo | miR166b | CTGGGATGAAGCCTGGTCCGG | SEQ ID |
| transcript down- | recognition site | | NO: 899 |
| regulation | | | |
| maize embryo | miR166b | CTGGAATGAAGCCTGGTCCGG | SEQ ID |
| transcript down- | recognition site | | NO: 900 |
| regulation | | | |
| maize embryo | miR166b | CGGGATGAAGCCTGGTCCGG | SEQ ID |
| transcript down- | recognition site | | NO: 901 |
| regulation | | | |
| maize endosperm | miR167g | GAGATCAGGCTGGCAGCTTGT | SEQ ID |
| transcript down- | recognition site | | NO: 902 |
| regulation | | | |
| maize endosperm | miR167g | TAGATCAGGCTGGCAGCTTGT | SEQ ID |
| transcript down- | recognition site | | NO: 903 |
| regulation | | | |
| maize endosperm | miR167g | AAGATCAGGCTGGCAGCTTGT | SEQ ID |
| transcript down- | recognition site | | NO: 904 |
| regulation | | | |
| maize pollen | miR156i | GTGCTCTCTCTCTTCTGTCA | SEQ ID |
| transcript down- | recognition site | | NO: 905 |
| regulation | | | |
| maize pollen | miR156i | CTGCTCTCTCTCTTCTGTCA | SEQ ID |
| transcript down- | recognition site | | NO: 906 |
| regulation | | | |
| maize pollen | miR156i | TTGCTTACTCTCTTCTGTCA | SEQ ID |
| transcript down- | recognition site | | NO: 907 |
| regulation | | | |
| maize pollen | miR156i | CCGCTCTCTCTCTTCTGTCA | SEQ ID |
| transcript down- | recognition site | | NO: 908 |
| regulation | | | |
| maize pollen | mir160b-like | TGGCATGCAGGGAGCCAGGCA | SEQ ID |
| transcript down- | recognition site | | NO: 909 |
| regulation | | | |
| maize pollen | mir160b-like | AGGAATACAGGGAGCCAGGCA | SEQ ID |
| transcript down- | recognition site | | NO: 910 |
| regulation | | | |
| maize pollen | mir160b-like | GGGTTTACAGGGAGCCAGGCA | SEQ ID |
| transcript down- | recognition site | | NO: 911 |
| regulation | | | |
| maize pollen | mir160b-like | AGGCATACAGGGAGCCAGGCA | SEQ ID |
| transcript down- | recognition site | | NO: 912 |
| regulation | | | |
| maize pollen | miR393a | AAACAATGCGATCCCTTTGGA | SEQ ID |
| transcript down- | recognition site | | NO: 913 |
| regulation | | | |
| maize pollen | miR393a | AGACCATGCGATCCCTTTGGA | SEQ ID |
| transcript down- | recognition site | | NO: 914 |
| regulation | | | |
| maize pollen | miR393a | GGTCAGAGCGATCCCTTTGGC | SEQ ID |
| transcript down- | recognition site | | NO: 915 |
| regulation | | | |
| maize pollen | miR393a | AGACAATGCGATCCCTTTGGA | SEQ ID |
| transcript down- | recognition site | | NO: 916 |
| regulation | | | |
| maize pollen | miR396a | TCGTTCAAGAAAGCCTGTGGAA | SEQ ID |
| transcript down- | recognition site | | NO: 917 |
| regulation | | | |
| maize pollen | miR396a | CGTTCAAGAAAGCCTGTGGAA | SEQ ID |
| transcript down- | recognition site | | NO: 918 |
| regulation | | | |
| maize pollen | miR396a | TCGTTCAAGAAAGCATGTGGAA | SEQ ID |
| transcript down- | recognition site | | NO: 919 |
| regulation | | | |
| maize pollen | miR396a | ACGTTCAAGAAAGCTTGTGGAA | SEQ ID |
| transcript down- | recognition site | | NO: 920 |
| regulation | | | |
| maize pollen | miR396a | CGTTCAAGAAAGCCTGTGGAA | SEQ ID |
| transcript down- | recognition site | | NO: 921 |
| regulation | | | |
| maize male tissue | male tissue- | GGACAACAAGCACCTTCTTGCCTTGCAAGGCCTCC | SEQ ID |
| transcript down- | specific | CTTCCCTATGGTAGCCACTTGAGTGGATGACTTCA | NO: 922 |
| regulation | siRNA element | CCTTAAAGCTATTGATTCCCTAAGTGCCAGACATAA | |
| | | TAGGCTATACATTCTCTCTGGTGGCAACAATGAGC | |
| | | CATTTTGGTTGGTGTGGTAGTCTATTATTGAGTTTT | |
| | | TTTTGGCACCGTACTCCCATGGAGAGTAGAAGACA | |
| | | AACTCTTCACCGTTGTAGTCGTTGATGGTATTGGT | |
| | | GGTGACGACATCCTTGGTGTGCATGCACTGGTGA | |
| | | GTCACTGTTGTACTCGGCG | |
| maize male tissue | male tissue- | GGACAACAAGCACCTTCTTGCCTTGCAAGGCCTCC | SEQ ID |
| transcript down- | specific | CTTCCCTATGGTAGCCACTTGAGTGGATGACTTCA | NO: 923 |
| regulation | siRNA element | CCTTAAAGCTATCGATTCCCTAAGTGCCAGACAT | |
| maize male tissue | male tissue- | CTCTTCACCGTTGTAGTCGTTGATGGTATTGGTGGT | SEQ ID |
| transcript down- | specific | GACGACATCCTTGGTGTGCATGCACTGGTGAGTCA | NO: 924 |
| regulation | siRNA element | CTGTTGTAC | |
| maize male tissue | male tissue- | GGACAACAAGCACCTTCTTGCCTTGCAAGGCCTCC | SEQ ID |
| transcript down- | specific | CTTCCCTATGGTAGCCACTTGAGTGGATGACTTCA | NO: 925 |
| regulation | siRNA element | CCTTAAAGCTATCGATTCCCTAAGTGCCAGACATCT | |
| | | CTTCACCGTTGTAGTCGTTGATGGTATTGGTGGTG | |
| | | ACGACATCCTTGGTGTGCATGCACTGGTGAGTCAC | |
| | | TGTTGTAC | |
| maize male tissue | male tissue- | CTCTTCACCGTTGTAGTCGTTGATGGTATTGGTGGT | SEQ ID |
| transcript down- | specific | GACGACATCCTTGGTGTGCATGCACTGGTGAGTCA | NO: 926 |
| regulation | siRNA element | CTGTTGTACGGACAACAAGCACCTTCTTGCCTTGC | |
| | | AAGGCCTCCCTTCCCTATGGTAGCCACTTGAGTGG | |
| | | ATGACTTCACCTTAAAGCTATCGATTCCCTAAGTGC | |
| | | CAGACAT | |
| up (auxin reponsive; | ocs enhancer | ACGTAAGCGCTTACGT | SEQ ID |
| constitutive) | (Agrobacterium | | NO: 927 |
| | sp.) | | |
| up (auxin reponsive; | 12-nt ocs | GTAAGCGCTTAC | SEQ ID |
| constitutive) | orthologue (Zea | | NO: 928 |
| | mays) | | |
| up (nitrogen | AtNRE | AAGAGATGAGCTCTTGAGCAATGTAAAGGGTCAA | SEQ ID |
| responsive) | | GTTGTTTCT | NO: 929 |
| up (nitrogen | AtNRE | AGAAACAACTTGACCCTTTACATTGCTCAAGAGCTC | SEQ ID |
| responsive) | | ATCTCTT | NO: 930 |
| up (auxin | 3xDR5 auxin- | ACCUUUUGUCGGCCUUUUGUCGGCCUUUUGUC | SEQ ID |
| responsive) | response element; | GG | NO: 931 |
| | RNA strand of | | |
| | RNA/DNA hybid | | |
| up (auxin | 3xDR5 auxin- | TCGGTCCGACAAAAGGCCGACAAAAGGCGGACAA | SEQ ID |
| responsive) | response element; | AAGG | NO: 932 |
| | sticky-ended | | |
| up (auxin | 3xDR5 auxin- | ACCGACCTTTTGTCGGCCTTTTGTCGGCCTTTTGTC | SEQ ID |
| responsive) | response element; | GG | NO: 933 |
| | sticky-ended | | |
| down or up (MAMP- | OsTBF1 uORF2 | ATGGGAGTAGAGGCGGGCGGCGGCTGCGGTGGG | SEQ ID |
| responsive) | | AGGGCGGTAGTCACCGGATTCTACGTCTGGGGCT | NO: 934 |
| | | GGGAGTTCCTCACCGCCCTCCTGCTCTTCTCGGCC | |
| | | ACCACCTCCTACTAG | |
| down or up (MAMP- | synthetic R-motif | AAAAAAAAAAAAAAA | SEQ ID |
| responsive) | | | NO: 935 |
| down or up (MAMP- | AtTBF1 R-motif | CACATACACACAAAAATAAAAAAGA | SEQ ID |
| responsive) | | | NO: 936 |
| decreases | insulator | GAATATATATATATTC | SEQ ID |
| upregulation | | | NO: 937 |
| sequence | ZmEPSPS exon 1 | GTGAACAACCTTATGAAATTTGGGCGCATAACTTC | SEQ ID |
| modification | with two point | GTATAGCATACATTATACGAAGTTATAAAGAACTC | NO: 938 |
| | mutations and | GCCCTCAAGGGTTGATCTTATGCCATCGTCATGAT | |
| | heterospecific | AAACAGTGGAGCACGGACGATCCTTTACGTTGTTT | |
| | lox sites | TTAACAAACTTTGTCAGAAAACTAGCATCATTAACT | |
| | | TCTTAATGACGATTTCACAACAAAAAAAGGTAACC | |
| | | TCGCTACTAACATAACAAAATACTTGTTGCTTATTA | |
| | | ATTATATGTTTTTTAATCTTTGATCAGGGGACAACA | |
| | | GTGGTTGATAACCTGTTGAACAGTGAGGATGTCCA | |
| | | CTACATGCTCGGGGCCTTGAGGACTCTTGGTCTCT | |
| | | CTGTCGAAGCGGACAAAGCTGCCAAAAGAGCTGT | |
| | | AGTTGTTGGCTGTGGTGGAAAGTTCCCAGTTGAG | |
| | | GATTCTAAAGAGGAAGTGCAGCTCTTCTTGGGGAA | |
| | | TGCTGGAATTGCAATGCGGGCATTGACAGCAGCT | |
| | | GTTACTGCTGCTGGTGGAAATGCAACGTATGTTTC | |
| | | CTCTCTTTCTCTCTACAATACTTGCATAACTTCGTAT | |
| | | AAAGTATCCTATACGAAGTTATTGGAGTTAGTATG | |
| | | AAACCCATGGGTATGTCTAGT | |
| decreases | miniature | TACTCCCTCCGTTTCTTTTTATTAGTCGCTGGATAGT | SEQ ID |
| upregulation | inverted-repeat | GCAATTTTGCACTATCCAGCGACTAATAAAAAGAA | NO: 939 |
| | transposable | ACGGAGGGAGTA | |
| | element (“MITE”) | | |
| decreases | miniature | TACTCCCTCCGTTTCTTTTTATTAGTCGCTGGATAGT | SEQ ID |
| upregulation | inverted-repeat | GCAAAATTGCACTATCCAGCGACTAATAAAAAGAA | NO: 940 |
| | transposable | ACGGAGGGAGTA | |
| | element (“MITE”) | | |
| up (constitutive) | G-box | ACACGTGACACGTGACACGTGACACGTG | SEQ ID |
| | | | NO: 941 |
| decreased transcript | mRNA destabilizing | TTATTTATTTTATTTATTTTATTTATTTTATTTATT | SEQ ID |
| stability | element | | NO: 942 |
| | (mammalian) | | |
| decreased transcript | mRNA destabilizing | AATTTTAATTTTAATTTTAATTTTAATTTTAATTTT | SEQ ID |
| stability | element | | NO: 943 |
| | (Arabidopsis | | |
| | thaliana) | | |
| increased transcript | mRNA stabilizing | TCTCTTTCTCTTTCTCTTTCTCTTTCTCTTTCTCTT | SEQ ID |
| stability | element | | NO: 944 |
| down | SHAT1-repressor | ATTAAAAAAATAAATAAGATATTATTAAAAAAATAA | SEQ ID |
| | | ATAAGATATTATTAAAAAAATAAATAAGATATTATT | NO: 945 |
| | | AAAAAAATAAATAAGATATT | |
| decreased transcript | SAUR mRNA | AGATCTAGGAGACTGACATAGATTGGAGGAGACA | SEQ ID |
| stability | destabilizing | TTTTGTATAATAAGATCTAGGAGACTGACATAGATT | NO: 946 |
| | element | GGAGGAGACATTTTGTATAATA | |
| down by recruiting | CTCC | CTCC(T/A/G)CC(G/T/A) | SEQ ID |
| transcription | | | NO: 947 |
| factors interacting | | | |
| with PRC2 | | | |
| down by recruiting | CCG | (C/T/A)(G/T)C(C/A)(G/A)(C/A)C(G/T) | SEQ ID |
| transcription | | (C/A) | NO: 948 |
| factors interacting | | | |
| with PRC2 | | | |
| down by recruiting | G-box | (C/G)ACGTGGNN(G/A/C)(T/A) | SEQ ID |
| transcription | | | NO: 949 |
| factors interacting | | | |
| with PRC2 | | | |
| down by recruiting | GA repeat | A(G/A)A(G/A)AGA(G/A)(A/G) | SEQ ID |
| transcription | | | NO: 950 |
| factors interacting | | | |
| with PRC2 | | | |
| down by recruiting | AC-rich | CA(A/T/C)CA(C/A)CA(A/C/T) | SEQ ID |
| transcription | | | NO: 951 |
| factors interacting | | | |
| with PRC2 | | | |
| down by recruiting | Telobox | (A/G)AACCC(T/A)A(A/G) | SEQ ID |
| transcription | | | NO: 952 |
| factors interacting | | | |
| with PRC2 | | | |
| up (Pi starvation | P1BS | GNATATNC | SEQ ID |
| response) | | | NO: 953 |
| up (constitutive) | 36 bp enhancer | GTAAGCGCTTACGTAAGCGCTTAC | SEQ ID |
| | | GTAAGCGCTTAC | NO: 1030 |

### Example 44

[0567] Insertion of the transcription enhancing element into a single target in maize protoplasts by NHEJ is illustrated in this example. Maize protoplasts were prepared using established methods (see US20190352655, which is incorporated herein by reference in its entirety).

[0568] Maize protoplasts were isolated from leaf material from B104 seedlings, and transfected with double-stranded oligos and RNPs consisting of Cas9 protein complexed with a tracrRNA:crRNA duplex targeting the ZmGln1-3 promoter (crRNA sequence: UACACGUACGAUUACAACCAGUUUUAGAGCUAUGCU; SEQ ID NO: 1049) and the double stranded oligos described below. The Cas9/tracrRNA/crRNA complex results in a double-stranded break in the DNA 66 bp upstream of the transcription start site of ZmGln1-3 (SEQ ID NO: 683). Three types of double-stranded oligos were tested: a 24 nt configuration containing two repeats of the enhancer sequence, a 36 bp configuration containing three repeats of the enhancer sequence, and a 48 nt configuration containing four repeats of the enhancer sequence. The oligos were 5′ phosphorylated, and contained two phosphorothioate bonds at both ends. As a control, protoplasts were transfected with only RNPs, i.e. without added oligos. Each transfection was performed in triplicate. After transfection, cells were washed, and incubated for 48 hours. At the end of the incubation period, cells were harvested for gDNA and RNA preparation.

[0569] To analyze insertion sites, the gDNA was used as template for PCR was performed with primers flanking the insertion site, and after bead clean-up the resulting amplicons were sequenced by next-generation sequencing. After read alignment to the target locus, the percentage of reads containing the enhancer sequence was used as a proxy for the fraction of cells that integrated the enhancer. The data is summarized in FIG. 5. For transfections with the double enhancer, 7% of cells were estimated to have integrated the enhancer element at the Gln1-3 target locus. For cells transfected with the triple or quadruple enhancer, 44% and 41% respectively of cells had integrated the enhancer element at the target locus. All numbers are averaged across 3 biological replicates. This data shows that the triple element performs the best in terms of insertion efficiency.

[0570] To assess the effect of the inserted enhancer sequence on the expression level of Gln1-3, bulk RNA was extracted from harvested protoplasts, and converted to cDNA. Using qRT-PCR, the expression level of ZmGln1-3 was measured relative to that of ZmAct1, a well-known reference gene; the data is summarized in FIG. 6. In cells transfected with the double enhancer, the expression level of ZmGln1-3 was indistinguishable from control cells transfected with only RNP. However, in cells transfected with the triple enhancer, the expression level of ZmGln1-3 was about 4.5-fold higher compared to controls. For cells transfected with the quadruple enhancer, it was only increased by 2.7-fold. This data indicates that both the triple and quadruple enhancer enhance expression of the target gene when integrated in the promoter, but the triple enhancer does so more efficiently.

### Example 45

[0571] Enhanced transcription in maize protoplasts at multiple gene targets with the 36 bp enhancer is illustrated in this example. Maize protoplasts were isolated from leaf material from B104 seedlings, and transfected with RNPs consisting of Cas9 complexed with a tracrRNA:crRNA duplex, either with or without double-stranded 5′ phosphorylated 36-nt enhancer (SEQ ID NO: 1030) oligos with two phosphorothioate bonds on both ends with the triple enhancer sequence (SEQ ID NO: 1030). Three crRNAs were used in this experiment, where the first crRNA (UACACGUACGAUUACAACCAGUUUUAGAGCUAUGCU; SEQ ID NO: 1050) targets the ZmGln1-3 (SEQ ID NO: 683) promoter, (UGUAUCCGUAUUUAUACGUGGUUUUAGAGCUAUGCU; SEQ ID NO: 1051) targets the ZmGln1-4 (SEQ ID NO: 685) promoter, and the third crRNA (CUCCAAGUGACCGAGCAAGAGUUUUAGAGCUAUGCU; SEQ ID NO: 1052) targets the ZmLc promoter (SEQ ID NO: 305). Each transfection was performed in triplicate. After transfection, cells were washed, and incubated for 48 hours. At the end of the incubation period, cells were harvested for gDNA and RNA preparation.

[0572] To analyze insertion sites, the gDNA was used as template for PCR was performed with primers flanking the insertion site, and after bead clean-up the resulting amplicons were sequenced by next-generation sequencing. After read alignment to the target locus, the percentage of reads containing the enhancer sequence was used as a proxy for the fraction of cells that integrated the enhancer. On reads without the enhancer sequence, the number of reads with indels due to NHEJ was determined. The insertion efficiency was in all three cases about half of the total editing efficiency (combining reads with only indels and reads with the oligo inserted), but the absolute insertion efficiency differed between the targets, and was 31% for ZmGln1-3, 9% for Gln1-4, and 12% for Lc.

[0573] To assess the effect of the inserted SEQ ID NO: 1030 enhancer sequence on the expression level of Gln1-3, bulk RNA was extracted from harvested protoplasts, and converted to cDNA. Using qRT-PCR, the expression level of the target gene (ZmGln1-3, ZmGln1-4, or ZmLc) was measured relative to that of ZmAct1, a well-known reference gene. These results are summarized in FIG. 7, showing an increase in expression of Lc by >400-fold, of Gln1-3 by 2.3-fold, and of Gln1-4 by 1.9-fold due to insertion of the maize enhancer sequence in the promoters of these genes. Considering that only a fraction of cells have integrated the enhancer sequence, as discussed above, the increase in gene expression in cells with the enhancer is even higher, indicating that the enhancer works well to increase expression level of multiple targets.

### Example 46

[0574] Maize genome editing and transformation is illustrated in this example. Immature embryos from a maize line ubiquitously expressing a CRISPR/Cas nuclease in the B104 background were bombarded with gold particles coated with a guide RNA targeting the Gln1-3 promoter in the Gln1.3 gene (SEQ ID NO: 683) and double-stranded 5′ phosphorylated oligonucleotides with 2 phosphorothioate bonds at both ends with the 36 nucleotide enhancer sequence (SEQ ID NO: 1030), and a plasmid encoding the pat resistance gene and a fluorescent protein. Through standard tissue culture practices, with selection for pat resistance and fluorescence, plants were regenerated containing the full or partial 36 bp enhancer element (SEQ ID NO: 1030). Leaf tissue was taken from regenerated plants for gDNA extraction to check for the presence of the insertion using primers flanking the gRNA target site. An increase in amplicon size allowed selection of events with the insertion present. Amplicon sequencing confirmed that oligo insertion happened at the predicted target sites, which for Gln1-3 was 66 bp upstream of the transcription start site (TSS), with efficiencies ranging from 0.5% to 1.1%, as indicated in Table 25.

TABLE 25
Efficiency of insertion of the triple enhancer element
into the ZmGln1.3 promoter through bombardment.

| | Embryos | Events | Events with | |
|---|---|---|---|---|
| Experiment | bombarded | regenerated | insertion | % efficiency |
| ZM035 | 271 | 7 | 1 | 0.4% |
| ZM037 | 306 | 4 | 3 | 1.0% |
| ZM041 | 348 | 6 | 4 | 1.1% |
| ZM072 | 454 | 15 | 3 | 0.7% |
| ZM081 | 383 | 3 | 2 | 0.5% |

[0575] RNA was prepared from leaf samples taken from young regenerants from a single bombardment experiment aimed to insert the maize enhancer element in the Gln1-3 promoter, and converted to cDNA. Using SYBR-based qRT-PCR, the expression level of Gln1-3 and the control ZmAct1 were measured. The same plants were also genotyped for the presence of the enhancer. The results are summarized in FIG. 4, showing that plants from events that did not have the enhancer inserted had low levels of Gln1-3, similar to the B104 untransformed control, while plants from events with the 36 bp enhancer element (SEQ ID NO: 1030) present had levels that were 4-10× higher than controls.

[0576] Plants containing the insertion were grown to maturity, and crossed to wild-type B104 plants. A T1BC1 population generated in this way coming from a plant heterozygous for the full-length 36 bp enhancer insertion was then grown for further analysis. From these plants, leaf tissue was sampled for genotyping for the insertion by PCR, and leaf, mesocotyl, and primary root tissue was harvested for RNA extraction, cDNA synthesis, and qRT-PCR for Gln1-3 and ZmAct1. The results of these experiments are shown in FIG. 5. Individuals with the insertion were compared to siblings that did not inherit the enhancer insertion allele, and to wild-type B104 plants grown alongside the T1BC1 plants. In both roots and mesocotyl there was a 2-fold and significant (p<0.05, two-sided Student's t-test) increase of Gln1-3 expression in plants with the insertion compared to siblings without the insertion and to B104 plants. In leaves, no difference in expression could be detected, possibly linked to the fact that Gln1-3 expression is already very high in leaf compared to root and mesocotyl.

### Example 45. Modification of Maize AlaATa and GS2 Genes

[0577] Immature embryos were harvested at 13 days after pollination from plants carrying a homozygous T-DNA containing ZmUbi::Cas in the B104 background crossed to wild-type B104. Embryos were incubated in the dark at 25° C. for 2 days on BOM1 media (for media recipes, see Table 26), and 3-5 hours prior to bombardment moved to BOM2 media. 800 ng synthetic gRNA (36 bp enhancer element), 800 ng double-stranded 36 bp enhancer element dsODNs (modified with 5′ phosphorylation and two phosphorothioate linkages at both ends; sequence GTAAGCGCTTACGTAAGCGCTTACGTAAGCGCTTAC; SEQ ID NO: 1030; 36 bp enhancer element) and 2 μg plasmid DNA were coated onto 400 μg 0.6 μm gold particles (Bio-Rad) using isopropanol/ammonium acetate and resuspended in 100 μl ethanol. Twelve μl gold solution was loaded onto a macrocarrier used for bombardment of 25 immature embryos with the Bio-Rad PDS-1000 instrument using 650 psi rupture disks. After bombardment, embryos were incubated for 1 day in the dark at 25° C. Then, embryos were incubated at 28° C. in continuous light (50 μmol/m2/s), and transferred through a series of media: ML4 for one week, ML5 for two weeks, and ML6 for two weeks. Then, callus was moved to 16 hours dark/8 hours light (150 μmol/m2/s) at 28° C., and grown on ML7 for two to three weeks and ML8 for one week to regenerate, before finally transferring regenerated seedlings to soil.

TABLE 26
Media used in the transformation

| | units | BOM1 | BOM2 | ML4 | ML5 | ML6 | ML7 | ML8 |
|---|---|---|---|---|---|---|---|---|
| MS Salts | g/L | 4.33 | 4.33 | 4.33 | 4.33 | 4.33 | 4.33 | 4.33 |
| Sucrose | g/L | 30 | 30 | 30 | 30 | 45 | 60 | 30 |
| myo-Inositol | g/L | 0.1 | 0.1 | 0.1 | 0.1 | 0.1 | 0.1 | 0.1 |
| Casein | g/L | 0.1 | 0.1 | 0.1 | 0.1 | 0.05 | | |
| Hydrolysate | | | | | | | | |
| L-Proline | g/L | 2.76 | 0.69 | 0.7 | 0.7 | 0.35 | | |
| MES | g/L | | | 0.5 | 0.5 | 0.5 | 0.5 | 0.5 |
| Sorbitol | g/L | | 36.4 | | | | | |
| Mannitol | g/L | | 36.4 | | | | | |
| Gelrite/Gelzan | g/L | 3 | 3 | 2.3 | 2.3 | 2.5 | 2.5 | 3 |
| pH | | 5.8 | 5.8 | 5.8 | 5.8 | 5.8 | 5.8 | 5.8 |
| Silver Nitrate | mL/L | 0.9 | 0.9 | 0.88 | 0.88 | 0.059 | | |
| (100 mM) | | | | | | | | |
| Dicamba-NaOH | mL/L | 0.5 | 0.5 | 0.5 | 0.5 | | | |
| (6.63 g/L) | | | | | | | | |
| NAA-NaOH | mL/L | | | | | 0.5 | | |
| (1 mg/mL) | | | | | | | | |
| BAP | mL/L | | | | | 1 | | |
| (1 mg/mL) | | | | | | | | |
| Abscisic | mL/L | | | | | 2.5 | | |
| acid-NaOH | | | | | | | | |
| (1 mg/mL) | | | | | | | | |
| CuSO4 | mL/L | | | | | 5 | | |
| (1 mg/mL) | | | | | | | | |
| PPT | mL/L | | | 0.075 | 0.25 | 0.25 | 0.3 | |
| (20 mg/mL) | | | | | | | | |
| Carbenicillin | mL/L | | | 2.5 | 2.5 | 2.5 | 1.25 | |
| (100 mg/mL) | | | | | | | | |
| Mc Cown Woody | mL/L | | | 1 | 1 | 1 | 1 | 1 |
| Vitamins | | | | | | | | |
| (1000x) | | | | | | | | |
| MS Vitamins | mL/L | 1 | 1 | | | | | |
| (1000x) | | | | | | | | |

[0578] Seeds from segregating T1 populations carrying a 3×PE insertion in the promoters of either alanine aminotransferase (AlaATa: Zm00001d030557 (1B73)/Zm00007a00001634 (B3104); mentioned in table 22; SEQ ID NO:1053 encoding SEQ ID NO: 1054), or GS2 (GS2=Zm00001d026501 (B373) (SEQ ID NO: 1024, encoding SEQ ID NO: 1025) were sown in vermiculite in 9×9×10 cm square pots placed in 18-pot trays, and placed in growth chambers with 16 hours light/8 hours dark and a constant temperature of 25° C. Vermiculite was kept humid by watering with tap water until two weeks after sowing, and from this point onwards pots were watered twice a week with 50 ml Hoagland's solution without nitrogen (Caisson Labs) supplemented with either 5 mM KNO₃ or 20 mM KNO₃ (Sigma). Trays were regularly randomized. 35 days after sowing, SPAD was measured on a position halfway along the leaf blade of leaf 3 using a MultiSpeq V2 device (PhotoSynq Inc.), senescence was scored visually, and plants were harvested for destructive measurement of shoot biomass. Data analysis and statistical testing was performed in R (version 4.0.5). Plants with increased AlaAT expression had a tendency towards less leaf senescence (p=0.06; chi-square test) and higher relative chlorophyll (p=0.004; Student's t-test) when grown in limited nitrogen compared to siblings that did not inherit the enhancer allele (FIG. 10A, B), suggesting higher tolerance to low nitrogen. Conversely, plants with higher GS2 expression had increased leaf senescence, especially under normal nitrogen levels (p=0.02; chi-square test: FIG. 10C).

[0579] All cited patents and patent publications referred to in this application are incorporated herein by reference in their entirety. All of the materials and methods disclosed and claimed herein can be made and used without undue experimentation as instructed by the above disclosure and illustrated by the examples. Although the materials and methods of this disclosure have been described in terms of embodiments and illustrative examples, it will be apparent to those of skill in the art that substitutions and variations can be applied to the materials and methods described herein without departing from the concept, spirit, and scope of the disclosure. For instance, while the particular examples provided illustrate the methods and embodiments described herein using a specific plant, the principles in these examples are applicable to any plant of interest; similarly, while the particular examples provided illustrate the methods and embodiments described herein using a particular sequence-specific nuclease such as Cas9, one of skill in the art would recognize that alternative sequence-specific nucleases (e. g., CRISPR nucleases other than Cas9, such as a Cpf1 (Cas12a) nuclease, a CasY (Cas12d) nuclease, a CasX (Cas12e) nuclease, a C2c1 nuclease, a C2c3 nuclease, a Cas12f nuclease, a Cas12i nuclease, a Cas12j nuclease, zinc-finger nucleases, transcription activator-like effector nucleases, Argonaute proteins, and meganucleases) are useful in various embodiments. All such similar substitutes and modifications apparent to those skilled in the art are deemed to be within the spirit, scope, and concept of the disclosure as encompassed by the embodiments of the disclosures recited herein and the specification and appended claims.

The application's sequence listing, which the Patent Office published only in electronic form, follows.

SEQUENCE LISTING (1054 sequences)

SEQ ID NO: 1 - RNA, 36 nt, artificial sequence
  synthetic construct
gcacuugaucaccuucccugguuuuagagcuaugcu

SEQ ID NO: 2 - RNA, 36 nt, artificial sequence
  synthetic construct
uccaccuccucgaucaccagguuuuagagcuaugcu

SEQ ID NO: 3 - RNA, 36 nt, artificial sequence
  synthetic construct
ggccucccagaaguagacguguuuuagagcuaugcu

SEQ ID NO: 4 - RNA, 36 nt, artificial sequence
  synthetic construct
gggaaggugaucaagugcaaguuuuagagcuaugcu

SEQ ID NO: 5 - RNA, 36 nt, artificial sequence
  synthetic construct
gccaccgucgaacccuuuggguuuuagagcuaugcu

SEQ ID NO: 6 - RNA, 36 nt, artificial sequence
  synthetic construct
guaaaugggcuucccguugaguuuuagagcuaugcu

SEQ ID NO: 7 - RNA, 36 nt, artificial sequence
  synthetic construct
gacagacucccguguucccuguuuuagagcuaugcu

SEQ ID NO: 8 - RNA, 36 nt, artificial sequence
  synthetic construct
gugaauucaggagcuggaggguuuuagagcuaugcu

SEQ ID NO: 9 - RNA, 36 nt, artificial sequence
  synthetic construct
guacuugcugagaugaccaaguuuuagagcuaugcu

SEQ ID NO: 10 - RNA, 36 nt, artificial sequence
  synthetic construct
gcaacaugugugaucugcucguuuuagagcuaugcu

SEQ ID NO: 11 - RNA, 36 nt, artificial sequence
  synthetic construct
uggccgggaggauucccaugguuuuagagcuaugcu

SEQ ID NO: 12 - RNA, 36 nt, artificial sequence
  synthetic construct
augguucaugcagugcacggguuuuagagcuaugcu

SEQ ID NO: 13 - RNA, 36 nt, artificial sequence
  synthetic construct
gcucgaggacgaacucggugguuuuagagcuaugcu

SEQ ID NO: 14 - RNA, 36 nt, artificial sequence
  synthetic construct
auguacuggagggagcugggguuuuagagcuaugcu

SEQ ID NO: 15 - RNA, 36 nt, artificial sequence
  synthetic construct
uagaauguauaauuacccguguuuuagagcuaugcu

SEQ ID NO: 16 - RNA, 36 nt, artificial sequence
  synthetic construct
cgggccucccgggagccaucguuuuagagcuaugcu

SEQ ID NO: 17 - RNA, 36 nt, artificial sequence
  synthetic construct
caagcaccuggggcgucugcguuuuagagcuaugcu

SEQ ID NO: 18 - RNA, 36 nt, artificial sequence
  synthetic construct
gagaucagaucuugccgaugguuuuagagcuaugcu

SEQ ID NO: 19 - RNA, 36 nt, artificial sequence
  synthetic construct
gaaggugaucuugcuauugaguuuuagagcuaugcu

SEQ ID NO: 20 - RNA, 36 nt, artificial sequence
  synthetic construct
gaagaugagugagcuugcguguuuuagagcuaugcu

SEQ ID NO: 21 - DNA, 720 bp, Zea mays
gaacagtgccgcagtggcgctgatcttgtatgctatcctgcaatcgtggtgaacttatttcttttatatcctttactcccatgaaaaggctagtaatctttctcgatgtaacatcgtccagcactgctattaccgtgtggtccatccgacagtctggctgaacacatcatacgatctatggagcaaaaatctatcttccctgttctttaatgaaggacgtcattttcattagtatgatctaggaatgttgcaacttgcaaggaggcgtttctttctttgaatttaactaactcgttgagtggccctgtttctcggacgtaaggcctttgctgctccacacatgtccattcgaattttaccgtgtttagcaagggcgaaaagtttgcatcttgatgatttagcttgactatgcgattgctttcctggacccgtgcagctgcggtggcatgggaggccggcaagccactgtcgatcgaggaggtggaggtagcgcctccgcaggccatggaggtgcgcgtcaagatcctcttcacctcgctctgccacaccgacgtctacttctgggaggccaaggtatctaatcagccatcccatttgtgatctttgtcagtagatatgatacaacaactcgcggttgacttgcgccttcttggcggcttatctgtcttaggggcagactcccgtgttccctcggatctttggccacgaggctggagggta

SEQ ID NO: 22 - DNA, 163 bp, Zea mays
atgcgattgctttcctggacccgtgcagctgcggtggcatgggaggccggcaagccactgtcgatcgaggaggtggaggtagcgcctccgcaggccatggaggtgcgcgtcaagatcctcttcacctcgctctgccacaccgacgtctacttctgggaggcca

SEQ ID NO: 23 - RNA, 36 nt, artificial sequence; identical to SEQ ID NO: 3
  synthetic construct

SEQ ID NO: 24 - DNA, 19 bp, artificial sequence
  synthetic construct
gaacagtgccgcagtggcg

SEQ ID NO: 25 - DNA, 19 bp, artificial sequence
  synthetic construct
taccctccagcctcgtggc

SEQ ID NO: 26 - DNA, 23 bp, artificial sequence
  synthetic construct
actatgcgattgctttcctggac

SEQ ID NO: 27 - DNA, 24 bp, artificial sequence
  synthetic construct
accgcgagttgttgtatcatatct

SEQ ID NO: 28 - DNA, 230 bp, artificial sequence
  synthetic construct
actatgcgattgctttcctggacccgtgcagctgcggtggcatgggaggccggcaagccactgtcgatcgaggaggtggaggtagcgcctccgcaggccatggaggtgcgcgtcaagatcctcttcacctcgctctgccacaccgacgtctacttctgggaggccaaggtatctaatcagccatcccatttgtgatctttgtcagtagatatgatacaacaactcgcggt

SEQ ID NO: 29 - DNA, 606 bp, Zea mays
aaccggtgtaatacatactaagggctagtttgggaaccctggttttctaaggaattttatttttccaaaaaaaatagtttatttttccttcggaaattaggaatctcttataaaattcgagttcccaaactattcctaatatatatatcatactctccatcagtctatatatagattacatatagtaagtatagagtatctcgctatcacatagtgccactaatcttctggagtgtaccagttgtataaatatctatcagtatcagcactactgtttgctgaataccccaaaactctctgcttgacttctcttccctaacctttgcactgtccaaaatggcttcctgatcccctcacttcctcgaatcattctaagaagaaactcaagccgctaccattaggggcagattaattgctgcactttcagataatctaccatggccactgtgaacaactggctcgctttctccctctccccgcaggagctgccgccctcccagacgacggactccacgctcatctcggccgccaccgccgaccatgtctccggcgatgtctgcttcaacatcccccaaggtagcatctatctatctggcgacatacgtg

SEQ ID NO: 30 - DNA, 254 bp, Zea mays
aaccggtgtaatacatactaagggctagtttgggaaccctggttttctaaggaattttatttttccaaaaaaaatagtttatttttccttcggaaattaggaatctcttataaaattcgagttcccaaactattcctaatatatatatcatactctccatcagtctatatatagattacatatagtaagtatagagtatctcgctatcacatagtgccactaatcttctggagtgtaccagttgtataaatatc

SEQ ID NO: 31 - RNA, 36 nt, artificial sequence
  synthetic construct
aagagauuccuaauuuccgaguuuuagagcuaugcu

SEQ ID NO: 32 - DNA, 20 bp, artificial sequence
  synthetic construct
gggaaccctggttttctaag

SEQ ID NO: 33 - DNA, 22 bp, artificial sequence
  synthetic construct
gcaaacagtagtgctgatactg

SEQ ID NO: 34 - DNA, 248 bp, artificial sequence
  synthetic construct
gggaaccctggttttctaaggaattttatttttccaaaaaaaatagtttatttttccttcggaaattaggaatctcttataaaattcgagttcccaaactattcctaatatatatatcatactctccatcagtctatatatagattacatatagtaagtatagagtatctcgctatcacatagtgccactaatcttctggagtgtaccagttgtataaatatctatcagtatcagcactactgtttgc

SEQ ID NO: 35 - DNA, 255 bp, Brassica oleracea
gaaacctaccagtctctcctttgaagaagacatgaacaaaattagccacggcgctctatctcggccttccggtaacgtttcttgttcaatattgttgtattagctttcatatgaccaaattcttcataattaaagatcggtatagaagtcatagattacatatatgtacatttgcacgggtgagtttgcaacaaatgtcgttttactttgtgaaatttaatccctaatcatgttttaggaatgctgcaccgtgcc

SEQ ID NO: 36 - DNA, 40 bp, Brassica oleracea
atgaacaaaattagccacggcgctctatctcggccttccg

SEQ ID NO: 37 - DNA, 17 bp, Brassica oleracea
gaatgctgcaccgtgcc

SEQ ID NO: 38 - RNA, 36 nt, artificial sequence
  synthetic construct
gaacaagaaacguuaccggaguuuuagagcuaugcu

SEQ ID NO: 39 - DNA, 23 bp, artificial sequence
  synthetic construct
gaaacctaccagtctctcctttg

SEQ ID NO: 40 - DNA, 20 bp, artificial sequence
  synthetic construct
ggcacggtgcagcattccta

SEQ ID NO: 41 - DNA, 206 bp, Brassica oleracea
ccgatggtcttcagttctcttccttgttatggtctcccccacgagatcctcaacaacataaggtacttaacaataataaataaagcctcagatgtctcatccatgaaccggtgctgattgtctttctccttaggatcaagtcgttgcttatgtcgaatactttggtcggttcacatcagagcaattccctgatgatattgctgagg

SEQ ID NO: 42 - DNA, 60 bp, Brassica oleracea
ccgatggtcttcagttctcttccttgttatggtctcccccacgagatcctcaacaacata

SEQ ID NO: 43 - DNA, 72 bp, Brassica oleracea
aggatcaagtcgttgcttatgtcgaatactttggtcggttcacatcagagcaattccctgatgatattgctg

SEQ ID NO: 44 - RNA, 36 nt, artificial sequence
  synthetic construct
ucgugggggagaccauaacaguuuuagagcuaugcu

SEQ ID NO: 45 - DNA, 20 bp, artificial sequence
  synthetic construct
ccgatggtcttcagttctct

SEQ ID NO: 46 - DNA, 20 bp, artificial sequence
  synthetic construct
cctcagcaatatcatcaggg

SEQ ID NO: 47 - DNA, 230 bp, artificial sequence; identical to SEQ ID NO: 28
  synthetic construct

SEQ ID NO: 48 - DNA, 230 bp, artificial sequence; identical to SEQ ID NO: 28
  synthetic construct

SEQ ID NO: 49 - DNA, 230 bp, artificial sequence; identical to SEQ ID NO: 28
  synthetic construct

SEQ ID NO: 50 - DNA, 230 bp, artificial sequence; identical to SEQ ID NO: 28
  synthetic construct

SEQ ID NO: 51 - DNA, 230 bp, artificial sequence; identical to SEQ ID NO: 28
  synthetic construct

SEQ ID NO: 52 - DNA, 230 bp, artificial sequence; identical to SEQ ID NO: 28
  synthetic construct

SEQ ID NO: 53 - DNA, 230 bp, artificial sequence; identical to SEQ ID NO: 28
  synthetic construct

SEQ ID NO: 54 - DNA, 230 bp, artificial sequence; identical to SEQ ID NO: 28
  synthetic construct

SEQ ID NO: 55 - DNA, 230 bp, artificial sequence; identical to SEQ ID NO: 28
  synthetic construct

SEQ ID NO: 56 - DNA, 230 bp, artificial sequence; identical to SEQ ID NO: 28
  synthetic construct

SEQ ID NO: 57 - DNA, 230 bp, artificial sequence; identical to SEQ ID NO: 28
  synthetic construct

SEQ ID NO: 58 - DNA, 230 bp, artificial sequence; identical to SEQ ID NO: 28
  synthetic construct

SEQ ID NO: 59 - DNA, 230 bp, artificial sequence; identical to SEQ ID NO: 28
  synthetic construct

SEQ ID NO: 60 - DNA, 230 bp, artificial sequence; identical to SEQ ID NO: 28
  synthetic construct

SEQ ID NO: 61 - DNA, 230 bp, artificial sequence; identical to SEQ ID NO: 28
  synthetic construct

SEQ ID NO: 62 - DNA, 230 bp, artificial sequence; identical to SEQ ID NO: 28
  synthetic construct

SEQ ID NO: 63 - DNA, 230 bp, artificial sequence; identical to SEQ ID NO: 28
  synthetic construct

SEQ ID NO: 64 - DNA, 230 bp, artificial sequence; identical to SEQ ID NO: 28
  synthetic construct

SEQ ID NO: 65 - DNA, 230 bp, artificial sequence; identical to SEQ ID NO: 28
  synthetic construct

SEQ ID NO: 66 - DNA, 230 bp, artificial sequence; identical to SEQ ID NO: 28
  synthetic construct

SEQ ID NO: 67 - DNA, 230 bp, artificial sequence; identical to SEQ ID NO: 28
  synthetic construct

SEQ ID NO: 68 - DNA, 230 bp, artificial sequence; identical to SEQ ID NO: 28
  synthetic construct

SEQ ID NO: 69 - DNA, 230 bp, artificial sequence; identical to SEQ ID NO: 28
  synthetic construct

SEQ ID NO: 70 - DNA, 230 bp, artificial sequence; identical to SEQ ID NO: 28
  synthetic construct

SEQ ID NO: 71 - DNA, 230 bp, artificial sequence; identical to SEQ ID NO: 28
  synthetic construct

SEQ ID NO: 72 - DNA, 230 bp, artificial sequence; identical to SEQ ID NO: 28
  synthetic construct

SEQ ID NO: 73 - DNA, 230 bp, artificial sequence; identical to SEQ ID NO: 28
  synthetic construct

SEQ ID NO: 74 - DNA, 230 bp, artificial sequence; identical to SEQ ID NO: 28
  synthetic construct

SEQ ID NO: 75 - DNA, 230 bp, artificial sequence; identical to SEQ ID NO: 28
  synthetic construct

SEQ ID NO: 76 - DNA, 230 bp, artificial sequence; identical to SEQ ID NO: 28
  synthetic construct

SEQ ID NO: 77 - DNA, 230 bp, artificial sequence; identical to SEQ ID NO: 28
  synthetic construct

SEQ ID NO: 78 - DNA, 230 bp, artificial sequence; identical to SEQ ID NO: 28
  synthetic construct

SEQ ID NO: 79 - DNA, 230 bp, artificial sequence; identical to SEQ ID NO: 28
  synthetic construct

SEQ ID NO: 80 - DNA, 230 bp, artificial sequence; identical to SEQ ID NO: 28
  synthetic construct

SEQ ID NO: 81 - DNA, 230 bp, artificial sequence; identical to SEQ ID NO: 28
  synthetic construct

SEQ ID NO: 82 - DNA, 230 bp, artificial sequence; identical to SEQ ID NO: 28
  synthetic construct

SEQ ID NO: 83 - DNA, 230 bp, artificial sequence; identical to SEQ ID NO: 28
  synthetic construct

SEQ ID NO: 84 - DNA, 230 bp, artificial sequence; identical to SEQ ID NO: 28
  synthetic construct

SEQ ID NO: 85 - DNA, 230 bp, artificial sequence; identical to SEQ ID NO: 28
  synthetic construct

SEQ ID NO: 86 - DNA, 230 bp, artificial sequence; identical to SEQ ID NO: 28
  synthetic construct

SEQ ID NO: 87 - DNA, 230 bp, artificial sequence; identical to SEQ ID NO: 28
  synthetic construct

SEQ ID NO: 88 - DNA, 230 bp, artificial sequence; identical to SEQ ID NO: 28
  synthetic construct

SEQ ID NO: 89 - DNA, 230 bp, artificial sequence; identical to SEQ ID NO: 28
  synthetic construct

SEQ ID NO: 90 - DNA, 230 bp, artificial sequence; identical to SEQ ID NO: 28
  synthetic construct

SEQ ID NO: 91 - DNA, 230 bp, artificial sequence; identical to SEQ ID NO: 28
  synthetic construct

SEQ ID NO: 92 - DNA, 230 bp, artificial sequence; identical to SEQ ID NO: 28
  synthetic construct

SEQ ID NO: 93 - DNA, 230 bp, artificial sequence; identical to SEQ ID NO: 28
  synthetic construct

SEQ ID NO: 94 - DNA, 230 bp, artificial sequence; identical to SEQ ID NO: 28
  synthetic construct

SEQ ID NO: 95 - DNA, 230 bp, artificial sequence; identical to SEQ ID NO: 28
  synthetic construct

SEQ ID NO: 96 - DNA, 230 bp, artificial sequence; identical to SEQ ID NO: 28
  synthetic construct

SEQ ID NO: 97 - DNA, 230 bp, artificial sequence; identical to SEQ ID NO: 28
  synthetic construct

SEQ ID NO: 98 - DNA, 230 bp, artificial sequence; identical to SEQ ID NO: 28
  synthetic construct

SEQ ID NO: 99 - DNA, 230 bp, artificial sequence; identical to SEQ ID NO: 28
  synthetic construct

SEQ ID NO: 100 - DNA, 230 bp, artificial sequence; identical to SEQ ID NO: 28
  synthetic construct

SEQ ID NO: 101 - DNA, 230 bp, artificial sequence; identical to SEQ ID NO: 28
  synthetic construct

SEQ ID NO: 102 - DNA, 230 bp, artificial sequence; identical to SEQ ID NO: 28
  synthetic construct

SEQ ID NO: 103 - DNA, 230 bp, artificial sequence; identical to SEQ ID NO: 28
  synthetic construct

SEQ ID NO: 104 - DNA, 230 bp, artificial sequence; identical to SEQ ID NO: 28
  synthetic construct

SEQ ID NO: 105 - DNA, 230 bp, artificial sequence; identical to SEQ ID NO: 28
  synthetic construct

SEQ ID NO: 106 - DNA, 230 bp, artificial sequence; identical to SEQ ID NO: 28
  synthetic construct

SEQ ID NO: 107 - DNA, 230 bp, artificial sequence; identical to SEQ ID NO: 28
  synthetic construct

SEQ ID NO: 108 - DNA, 230 bp, artificial sequence; identical to SEQ ID NO: 28
  synthetic construct

SEQ ID NO: 109 - DNA, 230 bp, artificial sequence; identical to SEQ ID NO: 28
  synthetic construct

SEQ ID NO: 110 - DNA, 230 bp, artificial sequence; identical to SEQ ID NO: 28
  synthetic construct

SEQ ID NO: 111 - DNA, 230 bp, artificial sequence; identical to SEQ ID NO: 28
  synthetic construct

SEQ ID NO: 112 - DNA, 230 bp, artificial sequence; identical to SEQ ID NO: 28
  synthetic construct

SEQ ID NO: 113 - DNA, 230 bp, artificial sequence; identical to SEQ ID NO: 28
  synthetic construct

SEQ ID NO: 114 - DNA, 230 bp, artificial sequence; identical to SEQ ID NO: 28
  synthetic construct

SEQ ID NO: 115 - DNA, 230 bp, artificial sequence; identical to SEQ ID NO: 28
  synthetic construct

SEQ ID NO: 116 - DNA, 230 bp, artificial sequence; identical to SEQ ID NO: 28
  synthetic construct

SEQ ID NO: 117 - DNA, 230 bp, artificial sequence; identical to SEQ ID NO: 28
  synthetic construct

SEQ ID NO: 118 - DNA, 230 bp, artificial sequence; identical to SEQ ID NO: 28
  synthetic construct

SEQ ID NO: 119 - DNA, 230 bp, artificial sequence; identical to SEQ ID NO: 28
  synthetic construct

SEQ ID NO: 120 - DNA, 230 bp, artificial sequence; identical to SEQ ID NO: 28
  synthetic construct

SEQ ID NO: 121 - DNA, 230 bp, artificial sequence; identical to SEQ ID NO: 28
  synthetic construct

SEQ ID NO: 122 - DNA, 230 bp, artificial sequence; identical to SEQ ID NO: 28
  synthetic construct

SEQ ID NO: 123 - DNA, 230 bp, artificial sequence; identical to SEQ ID NO: 28
  synthetic construct

SEQ ID NO: 124 - DNA, 230 bp, artificial sequence; identical to SEQ ID NO: 28
  synthetic construct

SEQ ID NO: 125 - DNA, 230 bp, artificial sequence; identical to SEQ ID NO: 28
  synthetic construct

SEQ ID NO: 126 - DNA, 230 bp, artificial sequence; identical to SEQ ID NO: 28
  synthetic construct

SEQ ID NO: 127 - DNA, 230 bp, artificial sequence; identical to SEQ ID NO: 28
  synthetic construct

SEQ ID NO: 128 - DNA, 230 bp, artificial sequence; identical to SEQ ID NO: 28
  synthetic construct

SEQ ID NO: 129 - DNA, 230 bp, artificial sequence; identical to SEQ ID NO: 28
  synthetic construct

SEQ ID NO: 130 - DNA, 230 bp, artificial sequence; identical to SEQ ID NO: 28
  synthetic construct

SEQ ID NO: 131 - DNA, 230 bp, artificial sequence; identical to SEQ ID NO: 28
  synthetic construct

SEQ ID NO: 132 - DNA, 230 bp, artificial sequence; identical to SEQ ID NO: 28
  synthetic construct

SEQ ID NO: 133 - DNA, 230 bp, artificial sequence; identical to SEQ ID NO: 28
  synthetic construct

SEQ ID NO: 134 - DNA, 230 bp, artificial sequence; identical to SEQ ID NO: 28
  synthetic construct

SEQ ID NO: 135 - DNA, 230 bp, artificial sequence; identical to SEQ ID NO: 28
  synthetic construct

SEQ ID NO: 136 - DNA, 3079 bp, artificial sequence
  synthetic construct
tcgcgcgtttcggtgatgacggtgaaaacctctgacacatgcagctcccggagacggtcacagcttgtctgtaagcggatgccgggagcagacaagcccgtcagggcgcgtcagcgggtgttggcgggtgtcggggctggcttaactatgcggcatcagagcagattgtactgagagtgcaccatatgcggtgtgaaataccgcacagatgcgtaaggagaaaataccgcatcaggcgccattcgccattcaggctgcgcaactgttgggaagggcgatcggtgcgggcctcttcgctattacgccagctggcgaaagggggatgtgctgcaaggcgattaagttgggtaacgccagggttttcccagtcacgacgttgtaaaacgacggccagtggaattctaaagatctaaaataaatggtaaaatgtcaaatcaaaactaggctgcagtatgcagagcagagtcatgatgatactacttactacaccgattcttgtgtgcagaaaaatatgttaaaataattgaatctttctctagccaaatttgacaacaatgtacaccgttcatattgagagacgatgcttcttgtttgctttcggtggaagctgcatatactcaacattactccttcagcgagttttccaactgagtcccacattgcccagacctaacacggtattcttgtttataatgaaatgtgccaccacatggattgaagcaagagacgttctagggttttagagctagaaatagcaagttaaaataaggctagtccgttatcaacttgaaaaagtggcaccgagtcggtgctttttttggatccggcgcgccgcatgcaagcttggcgtaatcatggtcatagctgtttcctgtgtgaaattgttatccgctcacaattccacacaacatacgagccggaagcataaagtgtaaagcctggggtgcctaatgagtgagctaactcacattaattgcgttgcgctcactgcccgctttccagtcgggaaacctgtcgtgccagctgcattaatgaatcggccaacgcgcggggagaggcggtttgcgtattgggcgctcttccgcttcctcgctcactgactcgctgcgctcggtcgttcggctgcggcgagcggtatcagctcactcaaaggcggtaatacggttatccacagaatcaggggataacgcaggaaagaacatgtgagcaaaaggccagcaaaaggccaggaaccgtaaaaaggccgcgttgctggcgtttttccataggctccgcccccctgacgagcatcacaaaaatcgacgctcaagtcagaggtggcgaaacccgacaggactataaagataccaggcgtttccccctggaagctccctcgtgcgctctcctgttccgaccctgccgcttaccggatacctgtccgcctttctcccttcgggaagcgtggcgctttctcatagctcacgctgtaggtatctcagttcggtgtaggtcgttcgctccaagctgggctgtgtgcacgaaccccccgttcagcccgaccgctgcgccttatccggtaactatcgtcttgagtccaacccggtaagacacgacttatcgccactggcagcagccactggtaacaggattagcagagcgaggtatgtaggcggtgctacagagttcttgaagtggtggcctaactacggctacactagaagaacagtatttggtatctgcgctctgctgaagccagttaccttcggaaaaagagttggtagctcttgatccggcaaacaaaccaccgctggtagcggtggtttttttgtttgcaagcagcagattacgcgcagaaaaaaaggatctcaagaagatcctttgatcttttctacggggtctgacgctcagtggaacgaaaactcacgttaagggattttggtcatgagattatcaaaaaggatcttcacctagatccttttaaattaaaaatgaagttttaaatcaatctaaagtatatatgagtaaacttggtctgacagttaccaatgcttaatcagtgaggcacctatctcagcgatctgtctatttcgttcatccatagttgcctgactccccgtcgtgtagataactacgatacgggagggcttaccatctggccccagtgctgcaatgataccgcgagacccacgctcaccggctccagatttatcagcaataaaccagccagccggaagggccgagcgcagaagtggtcctgcaactttatccgcctccatccagtctattaattgttgccgggaagctagagtaagtagttcgccagttaatagtttgcgcaacgttgttgccattgctacaggcatcgtggtgtcacgctcgtcgtttggtatggcttcattcagctccggttcccaacgatcaaggcgagttacatgatcccccatgttgtgcaaaaaagcggttagctccttcggtcctccgatcgttgtcagaagtaagttggccgcagtgttatcactcatggttatggcagcactgcataattctcttactgtcatgccatccgtaagatgcttttctgtgactggtgagtactcaaccaagtcattctgagaatagtgtatgcggcgaccgagttgctcttgcccggcgtcaatacgggataataccgcgccacatagcagaactttaaaagtgctcatcattggaaaacgttcttcggggcgaaaactctcaaggatcttaccgctgttgagatccagttcgatgtaacccactcgtgcacccaactgatcttcagcatcttttactttcaccagcgtttctgggtgagcaaaaacaggaaggcaaaatgccgcaaaaaagggaataagggcgacacggaaatgttgaatactcatactcttcctttttcaatattattgaagcatttatcagggttattgtctcatgagcggatacatatttgaatgtatttagaaaaataaacaaataggggttccgcgcacatttccccgaaaagtgccacctgacgtctaagaaaccattattatcatgacattaacctataaaaataggcgtatcacgaggccctttcgtc

SEQ ID NO: 137 - DNA, 20 bp, artificial sequence
  synthetic construct
gaagcaagagacgttctagg

SEQ ID NO: 138 - DNA, 76 bp, artificial sequence
  synthetic construct
gttttagagctagaaatagcaagttaaaataaggctagtccgttatcaacttgaaaaagtggcaccgagtcggtgc

SEQ ID NO: 139 - DNA, 96 bp, artificial sequence
  synthetic construct
gaagcaagagacgttctagggttttagagctagaaatagcaagttaaaataaggctagtccgttatcaacttgaaaaagtggcaccgagtcggtgc

SEQ ID NO: 140 - DNA, 8569 bp, artificial sequence
  synthetic construct
tcgcgcgtttcggtgatgacggtgaaaacctctgacacatgcagctcccggagacggtcacagcttgtctgtaagcggatgccgggagcagacaagcccgtcagggcgcgtcagcgggtgttggcgggtgtcggggctggcttaactatgcggcatcagagcagattgtactgagagtgcaccatatgcggtgtgaaataccgcacagatgcgtaaggagaaaataccgcatcaggcgccattcgccattcaggctgcgcaactgttgggaagggcgatcggtgcgggcctcttcgctattacgccagctggcgaaagggggatgtgctgcaaggcgattaagttgggtaacgccagggttttcccagtcacgacgttgtaaaacgacggccagtgaattctaaagatctggcgcgccggcccgggctggttattgtttttgtcaatgagctatcttttagtcttatgttattggtgaatctgtccttaagttgcatcatttaacacatctcctcattagagaaaaaaattcttccctaaacgattggtagtaaaaacatctaataagaaataagaaagaaaaattaggaaaaaggaaagttcattaaaaaaaatattttgaattattttttaaaaaatatctaaatattttttaaatgaataattttatataaactgtaactaaatgtatacaagtaatgtatgttaaaaaaatacttgaaaaatctactgaaaatatatcttacaaggtgaaattaaataagaaagaatttagtggaataattatgattttatttaaaaaataattattaaagatttttttgctccataataagaaaacttttcaattattcttttctggtccataataaaaaaaatctagcatgacagcttttccatagatttttaataatgtaaaagcagccgacttcaggcaatggatagtggggcccgtatcaacttcggacgctccacttgcaacggggtgggcccaatataacaacgacgtcgtaacagataaagcgaagattgaaggtgcatgtgactccgtcaagattacgaaaccgccaactaccacgcaaattgcaattctcaatttcctagaaggactctccgaaaatgcatccaataccaaatattacccgtgtcataggcaccaagtgacaccatacatgaacacgcgtcacaatatgactggagaagggttccacaccttatgctataaaacgccccacacccctcctccttccttcgcagttcaattccaatatattccattctctctgtgtatttccctacctctcccttcaaggttagtcgatttcttctgtttttcttcttcgttctttccatgaattgtgtatgttctttgatcaatacgatgttgatttgattgtgttttgtttggtttcatcgatcttcaattttcataatcagattcagcttttattatctttacaacaacgtccttaatttgatgattctttaatcgtagatttgctctaattagagctttttcatgtcagatccctttacaacaagccttaattgttgattcattaatcgtagattagggcttttttcattgattacttcagatccgttaaacgtaaccatagatcagggctttttcatgaattacttcagatccgttaaacaacagccttattttttatacttctgtggtttttcaagaaattgttcagatccgttgacaaaaagccttattcgttgattctatatcgtttttcgagagatattgctcagatgtgttagcaactgccttgtttgttgattctattgccgtggattagggttttttttcacgagattgcttcagatccgtacttaagattacgtaatggattttgattctgatttatctgtgattgttgactcgacaggatcggtaccccatggataagaagtactctatcggactcgatatcggaactaactctgtgggatgggctgtgatcaccgatgagtacaaggtgccatctaagaagttcaaggttctcggaaacaccgataggcactctatcaagaaaaaccttatcggtgctctcctcttcgattctggtgaaactgctgaggctaccagactcaagagaaccgctagaagaaggtacaccagaagaaagaacaggatctgctacctccaagagatcttctctaacgagatggctaaagtggatgattcattcttccacaggctcgaagagtcattcctcgtggaagaagataagaagcacgagaggcaccctatcttcggaaacatcgttgatgaggtggcataccacgagaagtaccctactatctaccacctcagaaagaagctcgttgattctactgataaggctgatctcaggctcatctacctcgctctcgctcacatgatcaagttcagaggacacttcctcatcgagggtgatctcaaccctgataactctgatgtggataagttgttcatccagctcgtgcagacctacaaccagcttttcgaagagaaccctatcaacgcttcaggtgtggatgctaaggctatcctctctgctaggctctctaagtcaagaaggcttgagaacctcattgctcagctccctggtgagaagaagaacggacttttcggaaacttgatcgctctctctctcggactcacccctaacttcaagtctaacttcgatctcgctgaggatgcaaagctccagctctcaaaggatacctacgatgatgatctcgataacctcctcgctcagatcggagatcagtacgctgatttgttcctcgctgctaagaacctctctgatgctatcctcctcagtgatatcctcagagtgaacaccgagatcaccaaggctccactctcagcttctatgatcaagagatacgatgagcaccaccaggatctcacacttctcaaggctcttgttagacagcagctcccagagaagtacaaagagattttcttcgatcagtctaagaacggatacgctggttacatcgatggtggtgcatctcaagaagagttctacaagttcatcaagcctatcctcgagaagatggatggaaccgaggaactcctcgtgaagctcaatagagaggatcttctcagaaagcagaggaccttcgataacggatctatccctcatcagatccacctcggagagttgcacgctatccttagaaggcaagaggatttctacccattcctcaaggataacagggaaaagattgagaagattctcaccttcagaatcccttactacgtgggacctctcgctagaggaaactcaagattcgcttggatgaccagaaagtctgaggaaaccatcaccccttggaacttcgaagaggtggtggataagggtgctagtgctcagtctttcatcgagaggatgaccaacttcgataagaaccttccaaacgagaaggtgctccctaagcactctttgctctacgagtacttcaccgtgtacaacgagttgaccaaggttaagtacgtgaccgagggaatgaggaagcctgcttttttgtcaggtgagcaaaagaaggctatcgttgatctcttgttcaagaccaacagaaaggtgaccgtgaagcagctcaaagaggattacttcaagaaaatcgagtgcttcgattcagttgagatttctggtgttgaggataggttcaacgcatctctcggaacctaccacgatctcctcaagatcattaaggataaggatttcttggataacgaggaaaacgaggatatcttggaggatatcgttcttaccctcaccctctttgaagatagagagatgattgaagaaaggctcaagacctacgctcatctcttcgatgataaggtgatgaagcagttgaagagaagaagatacactggttggggaaggctctcaagaaagctcattaacggaatcagggataagcagtctggaaagacaatccttgatttcctcaagtctgatggattcgctaacagaaacttcatgcagctcatccacgatgattctctcacctttaaagaggatatccagaaggctcaggtttcaggacagggtgatagtctccatgagcatatcgctaacctcgctggatctcctgcaatcaagaagggaatcctccagactgtgaaggttgtggatgagttggtgaaggtgatgggaaggcataagcctgagaacatcgtgatcgaaatggctagagagaaccagaccactcagaagggacagaagaactctagggaaaggatgaagaggatcgaggaaggtatcaaagagcttggatctcagatcctcaaagagcaccctgttgagaacactcagctccagaatgagaagctctacctctactacctccagaacggaagggatatgtatgtggatcaagagttggatatcaacaggctctctgattacgatgttgatcatatcgtgccacagtcattcttgaaggatgattctatcgataacaaggtgctcaccaggtctgataagaacaggggtaagagtgataacgtgccaagtgaagaggttgtgaagaaaatgaagaactattggaggcagctcctcaacgctaagctcatcactcagagaaagttcgataacttgactaaggctgagaggggaggactctctgaattggataaggcaggattcatcaagaggcagcttgtggaaaccaggcagatcactaagcacgttgcacagatcctcgattctaggatgaacaccaagtacgatgagaacgataagttgatcagggaagtgaaggttatcaccctcaagtcaaagctcgtgtctgatttcagaaaggatttccaattctacaaggtgagggaaatcaacaactaccaccacgctcacgatgcttaccttaacgctgttgttggaaccgctctcatcaagaagtatcctaagctcgagtcagagttcgtgtacggtgattacaaggtgtacgatgtgaggaagatgatcgctaagtctgagcaagagatcggaaaggctaccgctaagtatttcttctactctaacatcatgaatttcttcaagaccgagattaccctcgctaacggtgagatcagaaagaggccactcatcgagacaaacggtgaaacaggtgagatcgtgtgggataagggaagggatttcgctaccgttagaaaggtgctctctatgccacaggtgaacatcgttaagaaaaccgaggtgcagaccggtggattctctaaagagtctatcctccctaagaggaactctgataagctcattgctaggaagaaggattgggaccctaagaaatacggtggtttcgattctcctaccgtggcttactctgttctcgttgtggctaaggttgagaagggaaagagtaagaagctcaagtctgttaaggaacttctcggaatcactatcatggaaaggtcatctttcgagaagaacccaatcgatttcctcgaggctaagggatacaaagaggttaagaaggatctcatcatcaagctcccaaagtactcactcttcgaactcgagaacggtagaaagaggatgctcgcttctgctggtgagcttcaaaagggaaacgagcttgctctcccatctaagtacgttaactttctttacctcgcttctcactacgagaagttgaagggatctccagaagataacgagcagaagcaacttttcgttgagcagcacaagcactacttggatgagatcatcgagcagatctctgagttctctaaaagggtgatcctcgctgatgcaaacctcgataaggtgttgtctgcttacaacaagcacagagataagcctatcagggaacaggcagagaacatcatccatctcttcacccttaccaacctcggtgctcctgctgctttcaagtacttcgatacaaccatcgataggaagagatacacctctaccaaagaagtgctcgatgctaccctcatccatcagtctatcactggactctacgagactaggatcgatctctcacagctcggtggtgattcaagggctgatcctaagaagaagaggaaggtttgagcggccgcgatcgttcaaacatttggcaataaagtttcttaagattgaatcctgttgccggtcttgcgatgattatcatataatttctgttgaattacgttaagcatgtaataattaacatgtaatgcatgacgttatttatgagatgggtttttatgattagagtcccgcaattatacatttaatacgcgatagaaaacaaaatatagcgcgcaaactaggataaattatcgcgcgcggtgtcatctatgttactagatcggatccgcatgcaagcttggcgtaatcatggtcatagctgtttcctgtgtgaaattgttatccgctcacaattccacacaacatacgagccggaagcataaagtgtaaagcctggggtgcctaatgagtgagctaactcacattaattgcgttgcgctcactgcccgctttccagtcgggaaacctgtcgtgccagctgcattaatgaatcggccaacgcgcggggagaggcggtttgcgtattgggcgctcttccgcttcctcgctcactgactcgctgcgctcggtcgttcggctgcggcgagcggtatcagctcactcaaaggcggtaatacggttatccacagaatcaggggataacgcaggaaagaacatgtgagcaaaaggccagcaaaaggccaggaaccgtaaaaaggccgcgttgctggcgtttttccataggctccgcccccctgacgagcatcacaaaaatcgacgctcaagtcagaggtggcgaaacccgacaggactataaagataccaggcgtttccccctggaagctccctcgtgcgctctcctgttccgaccctgccgcttaccggatacctgtccgcctttctcccttcgggaagcgtggcgctttctcatagctcacgctgtaggtatctcagttcggtgtaggtcgttcgctccaagctgggctgtgtgcacgaaccccccgttcagcccgaccgctgcgccttatccggtaactatcgtcttgagtccaacccggtaagacacgacttatcgccactggcagcagccactggtaacaggattagcagagcgaggtatgtaggcggtgctacagagttcttgaagtggtggcctaactacggctacactagaagaacagtatttggtatctgcgctctgctgaagccagttaccttcggaaaaagagttggtagctcttgatccggcaaacaaaccaccgctggtagcggtggtttttttgtttgcaagcagcagattacgcgcagaaaaaaaggatctcaagaagatcctttgatcttttctacggggtctgacgctcagtggaacgaaaactcacgttaagggattttggtcatgagattatcaaaaaggatcttcacctagatccttttaaattaaaaatgaagttttaaatcaatctaaagtatatatgagtaaacttggtctgacagttaccaatgcttaatcagtgaggcacctatctcagcgatctgtctatttcgttcatccatagttgcctgactccccgtcgtgtagataactacgatacgggagggcttaccatctggccccagtgctgcaatgataccgcgagacccacgctcaccggctccagatttatcagcaataaaccagccagccggaagggccgagcgcagaagtggtcctgcaactttatccgcctccatccagtctattaattgttgccgggaagctagagtaagtagttcgccagttaatagtttgcgcaacgttgttgccattgctacaggcatcgtggtgtcacgctcgtcgtttggtatggcttcattcagctccggttcccaacgatcaaggcgagttacatgatcccccatgttgtgcaaaaaagcggttagctccttcggtcctccgatcgttgtcagaagtaagttggccgcagtgttatcactcatggttatggcagcactgcataattctcttactgtcatgccatccgtaagatgcttttctgtgactggtgagtactcaaccaagtcattctgagaatagtgtatgcggcgaccgagttgctcttgcccggcgtcaatacgggataataccgcgccacatagcagaactttaaaagtgctcatcattggaaaacgttcttcggggcgaaaactctcaaggatcttaccgctgttgagatccagttcgatgtaacccactcgtgcacccaactgatcttcagcatcttttactttcaccagcgtttctgggtgagcaaaaacaggaaggcaaaatgccgcaaaaaagggaataagggcgacacggaaatgttgaatactcatactcttcctttttcaatattattgaagcatttatcagggttattgtctcatgagcggatacatatttgaatgtatttagaaaaataaacaaataggggttccgcgcacatttccccgaaaagtgccacctgacgtctaagaaaccattattatcatgacattaacctataaaaataggcgtatcacgaggccctttcgtc

SEQ ID NO: 141 - DNA, 4104 bp, artificial sequence
  synthetic construct
atggataagaagtactctatcggactcgatatcggaactaactctgtgggatgggctgtgatcaccgatgagtacaaggtgccatctaagaagttcaaggttctcggaaacaccgataggcactctatcaagaaaaaccttatcggtgctctcctcttcgattctggtgaaactgctgaggctaccagactcaagagaaccgctagaagaaggtacaccagaagaaagaacaggatctgctacctccaagagatcttctctaacgagatggctaaagtggatgattcattcttccacaggctcgaagagtcattcctcgtggaagaagataagaagcacgagaggcaccctatcttcggaaacatcgttgatgaggtggcataccacgagaagtaccctactatctaccacctcagaaagaagctcgttgattctactgataaggctgatctcaggctcatctacctcgctctcgctcacatgatcaagttcagaggacacttcctcatcgagggtgatctcaaccctgataactctgatgtggataagttgttcatccagctcgtgcagacctacaaccagcttttcgaagagaaccctatcaacgcttcaggtgtggatgctaaggctatcctctctgctaggctctctaagtcaagaaggcttgagaacctcattgctcagctccctggtgagaagaagaacggacttttcggaaacttgatcgctctctctctcggactcacccctaacttcaagtctaacttcgatctcgctgaggatgcaaagctccagctctcaaaggatacctacgatgatgatctcgataacctcctcgctcagatcggagatcagtacgctgatttgttcctcgctgctaagaacctctctgatgctatcctcctcagtgatatcctcagagtgaacaccgagatcaccaaggctccactctcagcttctatgatcaagagatacgatgagcaccaccaggatctcacacttctcaaggctcttgttagacagcagctcccagagaagtacaaagagattttcttcgatcagtctaagaacggatacgctggttacatcgatggtggtgcatctcaagaagagttctacaagttcatcaagcctatcctcgagaagatggatggaaccgaggaactcctcgtgaagctcaatagagaggatcttctcagaaagcagaggaccttcgataacggatctatccctcatcagatccacctcggagagttgcacgctatccttagaaggcaagaggatttctacccattcctcaaggataacagggaaaagattgagaagattctcaccttcagaatcccttactacgtgggacctctcgctagaggaaactcaagattcgcttggatgaccagaaagtctgaggaaaccatcaccccttggaacttcgaagaggtggtggataagggtgctagtgctcagtctttcatcgagaggatgaccaacttcgataagaaccttccaaacgagaaggtgctccctaagcactctttgctctacgagtacttcaccgtgtacaacgagttgaccaaggttaagtacgtgaccgagggaatgaggaagcctgcttttttgtcaggtgagcaaaagaaggctatcgttgatctcttgttcaagaccaacagaaaggtgaccgtgaagcagctcaaagaggattacttcaagaaaatcgagtgcttcgattcagttgagatttctggtgttgaggataggttcaacgcatctctcggaacctaccacgatctcctcaagatcattaaggataaggatttcttggataacgaggaaaacgaggatatcttggaggatatcgttcttaccctcaccctctttgaagatagagagatgattgaagaaaggctcaagacctacgctcatctcttcgatgataaggtgatgaagcagttgaagagaagaagatacactggttggggaaggctctcaagaaagctcattaacggaatcagggataagcagtctggaaagacaatccttgatttcctcaagtctgatggattcgctaacagaaacttcatgcagctcatccacgatgattctctcacctttaaagaggatatccagaaggctcaggtttcaggacagggtgatagtctccatgagcatatcgctaacctcgctggatctcctgcaatcaagaagggaatcctccagactgtgaaggttgtggatgagttggtgaaggtgatgggaaggcataagcctgagaacatcgtgatcgaaatggctagagagaaccagaccactcagaagggacagaagaactctagggaaaggatgaagaggatcgaggaaggtatcaaagagcttggatctcagatcctcaaagagcaccctgttgagaacactcagctccagaatgagaagctctacctctactacctccagaacggaagggatatgtatgtggatcaagagttggatatcaacaggctctctgattacgatgttgatcatatcgtgccacagtcattcttgaaggatgattctatcgataacaaggtgctcaccaggtctgataagaacaggggtaagagtgataacgtgccaagtgaagaggttgtgaagaaaatgaagaactattggaggcagctcctcaacgctaagctcatcactcagagaaagttcgataacttgactaaggctgagaggggaggactctctgaattggataaggcaggattcatcaagaggcagcttgtggaaaccaggcagatcactaagcacgttgcacagatcctcgattctaggatgaacaccaagtacgatgagaacgataagttgatcagggaagtgaaggttatcaccctcaagtcaaagctcgtgtctgatttcagaaaggatttccaattctacaaggtgagggaaatcaacaactaccaccacgctcacgatgcttaccttaacgctgttgttggaaccgctctcatcaagaagtatcctaagctcgagtcagagttcgtgtacggtgattacaaggtgtacgatgtgaggaagatgatcgctaagtctgagcaagagatcggaaaggctaccgctaagtatttcttctactctaacatcatgaatttcttcaagaccgagattaccctcgctaacggtgagatcagaaagaggccactcatcgagacaaacggtgaaacaggtgagatcgtgtgggataagggaagggatttcgctaccgttagaaaggtgctctctatgccacaggtgaacatcgttaagaaaaccgaggtgcagaccggtggattctctaaagagtctatcctccctaagaggaactctgataagctcattgctaggaagaaggattgggaccctaagaaatacggtggtttcgattctcctaccgtggcttactctgttctcgttgtggctaaggttgagaagggaaagagtaagaagctcaagtctgttaaggaacttctcggaatcactatcatggaaaggtcatctttcgagaagaacccaatcgatttcctcgaggctaagggatacaaagaggttaagaaggatctcatcatcaagctcccaaagtactcactcttcgaactcgagaacggtagaaagaggatgctcgcttctgctggtgagcttcaaaagggaaacgagcttgctctcccatctaagtacgttaactttctttacctcgcttctcactacgagaagttgaagggatctccagaagataacgagcagaagcaacttttcgttgagcagcacaagcactacttggatgagatcatcgagcagatctctgagttctctaaaagggtgatcctcgctgatgcaaacctcgataaggtgttgtctgcttacaacaagcacagagataagcctatcagggaacaggcagagaacatcatccatctcttcacccttaccaacctcggtgctcctgctgctttcaagtacttcgatacaaccatcgataggaagagatacacctctaccaaagaagtgctcgatgctaccctcatccatcagtctatcactggactctacgagactaggatcgatctctcacagctcggtggtgat

SEQ ID NO: 142 - protein, 1368 aa, Streptococcus pyogenes [sequence omitted]

SEQ ID NO: 143 - DNA, 21 bp, artificial sequence
  synthetic construct
cctaagaagaagaggaaggtt

SEQ ID NO: 144 - protein, 7 aa, artificial sequence
  synthetic construct
PKKKRKV

SEQ ID NO: 145 - DNA, 4137 bp, artificial sequence
  synthetic construct
atggataagaagtactctatcggactcgatatcggaactaactctgtgggatgggctgtgatcaccgatgagtacaaggtgccatctaagaagttcaaggttctcggaaacaccgataggcactctatcaagaaaaaccttatcggtgctctcctcttcgattctggtgaaactgctgaggctaccagactcaagagaaccgctagaagaaggtacaccagaagaaagaacaggatctgctacctccaagagatcttctctaacgagatggctaaagtggatgattcattcttccacaggctcgaagagtcattcctcgtggaagaagataagaagcacgagaggcaccctatcttcggaaacatcgttgatgaggtggcataccacgagaagtaccctactatctaccacctcagaaagaagctcgttgattctactgataaggctgatctcaggctcatctacctcgctctcgctcacatgatcaagttcagaggacacttcctcatcgagggtgatctcaaccctgataactctgatgtggataagttgttcatccagctcgtgcagacctacaaccagcttttcgaagagaaccctatcaacgcttcaggtgtggatgctaaggctatcctctctgctaggctctctaagtcaagaaggcttgagaacctcattgctcagctccctggtgagaagaagaacggacttttcggaaacttgatcgctctctctctcggactcacccctaacttcaagtctaacttcgatctcgctgaggatgcaaagctccagctctcaaaggatacctacgatgatgatctcgataacctcctcgctcagatcggagatcagtacgctgatttgttcctcgctgctaagaacctctctgatgctatcctcctcagtgatatcctcagagtgaacaccgagatcaccaaggctccactctcagcttctatgatcaagagatacgatgagcaccaccaggatctcacacttctcaaggctcttgttagacagcagctcccagagaagtacaaagagattttcttcgatcagtctaagaacggatacgctggttacatcgatggtggtgcatctcaagaagagttctacaagttcatcaagcctatcctcgagaagatggatggaaccgaggaactcctcgtgaagctcaatagagaggatcttctcagaaagcagaggaccttcgataacggatctatccctcatcagatccacctcggagagttgcacgctatccttagaaggcaagaggatttctacccattcctcaaggataacagggaaaagattgagaagattctcaccttcagaatcccttactacgtgggacctctcgctagaggaaactcaagattcgcttggatgaccagaaagtctgaggaaaccatcaccccttggaacttcgaagaggtggtggataagggtgctagtgctcagtctttcatcgagaggatgaccaacttcgataagaaccttccaaacgagaaggtgctccctaagcactctttgctctacgagtacttcaccgtgtacaacgagttgaccaaggttaagtacgtgaccgagggaatgaggaagcctgcttttttgtcaggtgagcaaaagaaggctatcgttgatctcttgttcaagaccaacagaaaggtgaccgtgaagcagctcaaagaggattacttcaagaaaatcgagtgcttcgattcagttgagatttctggtgttgaggataggttcaacgcatctctcggaacctaccacgatctcctcaagatcattaaggataaggatttcttggataacgaggaaaacgaggatatcttggaggatatcgttcttaccctcaccctctttgaagatagagagatgattgaagaaaggctcaagacctacgctcatctcttcgatgataaggtgatgaagcagttgaagagaagaagatacactggttggggaaggctctcaagaaagctcattaacggaatcagggataagcagtctggaaagacaatccttgatttcctcaagtctgatggattcgctaacagaaacttcatgcagctcatccacgatgattctctcacctttaaagaggatatccagaaggctcaggtttcaggacagggtgatagtctccatgagcatatcgctaacctcgctggatctcctgcaatcaagaagggaatcctccagactgtgaaggttgtggatgagttggtgaaggtgatgggaaggcataagcctgagaacatcgtgatcgaaatggctagagagaaccagaccactcagaagggacagaagaactctagggaaaggatgaagaggatcgaggaaggtatcaaagagcttggatctcagatcctcaaagagcaccctgttgagaacactcagctccagaatgagaagctctacctctactacctccagaacggaagggatatgtatgtggatcaagagttggatatcaacaggctctctgattacgatgttgatcatatcgtgccacagtcattcttgaaggatgattctatcgataacaaggtgctcaccaggtctgataagaacaggggtaagagtgataacgtgccaagtgaagaggttgtgaagaaaatgaagaactattggaggcagctcctcaacgctaagctcatcactcagagaaagttcgataacttgactaaggctgagaggggaggactctctgaattggataaggcaggattcatcaagaggcagcttgtggaaaccaggcagatcactaagcacgttgcacagatcctcgattctaggatgaacaccaagtacgatgagaacgataagttgatcagggaagtgaaggttatcaccctcaagtcaaagctcgtgtctgatttcagaaaggatttccaattctacaaggtgagggaaatcaacaactaccaccacgctcacgatgcttaccttaacgctgttgttggaaccgctctcatcaagaagtatcctaagctcgagtcagagttcgtgtacggtgattacaaggtgtacgatgtgaggaagatgatcgctaagtctgagcaagagatcggaaaggctaccgctaagtatttcttctactctaacatcatgaatttcttcaagaccgagattaccctcgctaacggtgagatcagaaagaggccactcatcgagacaaacggtgaaacaggtgagatcgtgtgggataagggaagggatttcgctaccgttagaaaggtgctctctatgccacaggtgaacatcgttaagaaaaccgaggtgcagaccggtggattctctaaagagtctatcctccctaagaggaactctgataagctcattgctaggaagaaggattgggaccctaagaaatacggtggtttcgattctcctaccgtggcttactctgttctcgttgtggctaaggttgagaagggaaagagtaagaagctcaagtctgttaaggaacttctcggaatcactatcatggaaaggtcatctttcgagaagaacccaatcgatttcctcgaggctaagggatacaaagaggttaagaaggatctcatcatcaagctcccaaagtactcactcttcgaactcgagaacggtagaaagaggatgctcgcttctgctggtgagcttcaaaagggaaacgagcttgctctcccatctaagtacgttaactttctttacctcgcttctcactacgagaagttgaagggatctccagaagataacgagcagaagcaacttttcgttgagcagcacaagcactacttggatgagatcatcgagcagatctctgagttctctaaaagggtgatcctcgctgatgcaaacctcgataaggtgttgtctgcttacaacaagcacagagataagcctatcagggaacaggcagagaacatcatccatctcttcacccttaccaacctcggtgctcctgctgctttcaagtacttcgatacaaccatcgataggaagagatacacctctaccaaagaagtgctcgatgctaccctcatccatcagtctatcactggactctacgagactaggatcgatctctcacagctcggtggtgattcaagggctgatcctaagaagaagaggaaggtt

SEQ ID NO: 146 - protein, 1379 aa, artificial sequence
  synthetic construct
MDKKYSIGLDIGTNSVGWAVITDEYKVPSKKFKVLGNTDRHSIKKNLIGALLFDSGETAEATRLKRTARRRYTRRKNRICYLQEIFSNEMAKVDDSFFHRLEESFLVEEDKKHERHPIFGNIVDEVAYHEKYPTIYHLRKKLVDSTDKADLRLIYLALAHMIKFRGHFLIEGDLNPDNSDVDKLFIQLVQTYNQLFEENPINASGVDAKAILSARLSKSRRLENLIAQLPGEKKNGLFGNLIALSLGLTPNFKSNFDLAEDAKLQLSKDTYDDDLDNLLAQIGDQYADLFLAAKNLSDAILLSDILRVNTEITKAPLSASMIKRYDEHHQDLTLLKALVRQQLPEKYKEIFFDQSKNGYAGYIDGGASQEEFYKFIKPILEKMDGTEELLVKLNREDLLRKQRTFDNGSIPHQIHLGELHAILRRQEDFYPFLKDNREKIEKILTFRIPYYVGPLARGNSRFAWMTRKSEETITPWNFEEVVDKGASAQSFIERMTNFDKNLPNEKVLPKHSLLYEYFTVYNELTKVKYVTEGMRKPAFLSGEQKKAIVDLLFKTNRKVTVKQLKEDYFKKIECFDSVEISGVEDRFNASLGTYHDLLKIIKDKDFLDNEENEDILEDIVLTLTLFEDREMIEERLKTYAHLFDDKVMKQLKRRRYTGWGRLSRKLINGIRDKQSGKTILDFLKSDGFANRNFMQLIHDDSLTFKEDIQKAQVSGQGDSLHEHIANLAGSPAIKKGILQTVKVVDELVKVMGRHKPENIVIEMARENQTTQKGQKNSRERMKRIEEGIKELGSQILKEHPVENTQLQNEKLYLYYLQNGRDMYVDQELDINRLSDYDVDHIVPQSFLKDDSIDNKVLTRSDKNRGKSDNVPSEEVVKKMKNYWRQLLNAKLITQRKFDNLTKAERGGLSELDKAGFIKRQLVETRQITKHVAQILDSRMNTKYDENDKLIREVKVITLKSKLVSDFRKDFQFYKVREINNYHHAHDAYLNAVVGTALIKKYPKLESEFVYGDYKVYDVRKMIAKSEQEIGKATAKYFFYSNIMNFFKTEITLANGEIRKRPLIETNGETGEIVWDKGRDFATVRKVLSMPQVNIVKKTEVQTGGFSKESILPKRNSDKLIARKKDWDPKKYGGFDSPTVAYSVLVVAKVEKGKSKKLKSVKELLGITIMERSSFEKNPIDFLEAKGYKEVKKDLIIKLPKYSLFELENGRKRMLASAGELQKGNELALPSKYVNFLYLASHYEKLKGSPEDNEQKQLFVEQHKHYLDEIIEQISEFSKRVILADANLDKVLSAYNKHRDKPIREQAENIIHLFTLTNLGAPAAFKYFDTTIDRKRYTSTKEVLDATLIHQSITGLYETRIDLSQLGGDSRADPKKKRKV

SEQ ID NO: 147 - protein, 13 aa, artificial sequence
  synthetic construct
GRKKRRQRRRPPQ

SEQ ID NO: 148 - protein, 12 aa, artificial sequence
  synthetic construct
GRKKRRQRRRPQ

SEQ ID NO: 149 - protein, 11 aa, artificial sequence
  synthetic construct
YGRKKRRQRRR

SEQ ID NO: 150 - protein, 18 aa, artificial sequence
  synthetic construct
KLALKLALKALKAALKLA

SEQ ID NO: 151 - protein, 16 aa, artificial sequence
  synthetic construct
RQIRIWFQNRRMRWRR

SEQ ID NO: 152 - protein, 17 aa, artificial sequence
  synthetic construct
CSIPPEVKFNKPFVYLI

SEQ ID NO: 153 - protein, 30 aa, artificial sequence
  synthetic construct
RRRQRRKKRGGDIMGEWGNEIFGAIAGFLG

SEQ ID NO: 154 - protein, 13 aa, artificial sequence
  synthetic construct
FVQWFSKFLGRIL

SEQ ID NO: 155 - protein, 18 aa, artificial sequence
  synthetic construct
LLIILRRRIRKQAHAHSK

SEQ ID NO: 156 - protein, 24 aa, artificial sequence
  synthetic construct
LGTYTQDFNKFHTFPQTAIGVGAP

SEQ ID NO: 157 - protein, 30 aa, artificial sequence
  synthetic construct
GAAEAAARVYDLGLRRLRQRRRLRRERVRA

SEQ ID NO: 158 - protein, 27 aa, artificial sequence
  synthetic construct
MGLGLHLLVLAAALQGAWSQPKKKRKV

SEQ ID NO: 159 - protein, 18 aa, artificial sequence
  synthetic construct
RQIKIWFQNRRMKWKKGG

SEQ ID NO: 160 - protein, 8 aa, artificial sequence
  synthetic construct
RRRRRRRR

SEQ ID NO: 161 - protein, 9 aa, artificial sequence
  synthetic construct
RRRRRRRRR

SEQ ID NO: 162 - protein, 30 aa, artificial sequence
  synthetic construct
KKLFKKILKYLKKLFKKILKYLKKKKKKKK

SEQ ID NO: 163 - DNA, 14548 bp, artificial sequence
  synthetic construct
  misc_feature (13426)..(13426)
  misc_feature (13426)..(13426): n is a, c, g, or t
agtactttgatccaacccctccgctgctatagtgcagtcggcttctgacgttcagtgcagccgtcttctgaaaacgacatgtcgcacaagtcctaagttacgcgacaggctgccgccctgcccttttcctggcgttttcttgtcgcgtgttttagtcgcataaagtagaatacttgcgactagaaccggagacattacgccatgaacaagagcgccgccgctggcctgctgggctatgcccgcgtcagcaccgacgaccaggacttgaccaaccaacgggccgaactgcacgcggccggctgcaccaagctgttttccgagaagatcaccggcaccaggcgcgaccgcccggagctggccaggatgcttgaccacctacgccctggcgacgttgtgacagtgaccaggctagaccgcctggcccgcagcacccgcgacctactggacattgccgagcgcatccaggaggccggcgcgggcctgcgtagcctggcagagccgtgggccgacaccaccacgccggccggccgcatggtgttgaccgtgttcgccggcattgccgagttcgagcgttccctaatcatcgaccgcacccggagcgggcgcgaggccgccaaggcccgaggcgtgaagtttggcccccgccctaccctcaccccggcacagatcgcgcacgcccgcgagctgatcgaccaggaaggccgcaccgtgaaagaggcggctgcactgcttggcgtgcatcgctcgaccctgtaccgcgcacttgagcgcagcgaggaagtgacgcccaccgaggccaggcggcgcggtgccttccgtgaggacgcattgaccgaggccgacgccctggcggccgccgagaatgaacgccaagaggaacaagcatgaaaccgcaccaggacggccaggacgaaccgtttttcattaccgaagagatcgaggcggagatgatcgcggccgggtacgtgttcgagccgcccgcgcacgtctcaaccgtgcggctgcatgaaatcctggccggtttgtctgatgccaagctggcggcctggccggccagcttggccgctgaagaaaccgagcgccgccgtctaaaaaggtgatgtgtatttgagtaaaacagcttgcgtcatgcggtcgctgcgtatatgatgcgatgagtaaataaacaaatacgcaaggggaacgcatgaaggttatcgctgtacttaaccagaaaggcgggtcaggcaagacgaccatcgcaacccatctagcccgcgccctgcaactcgccggggccgatgttctgttagtcgattccgatccccagggcagtgcccgcgattgggcggccgtgcgggaagatcaaccgctaaccgttgtcggcatcgaccgcccgacgattgaccgcgacgtgaaggccatcggccggcgcgacttcgtagtgatcgacggagcgccccaggcggcggacttggctgtgtccgcgatcaaggcagccgacttcgtgctgattccggtgcagccaagcccttacgacatatgggccaccgccgacctggtggagctggttaagcagcgcattgaggtcacggatggaaggctacaagcggcctttgtcgtgtcgcgggcgatcaaaggcacgcgcatcggcggtgaggttgccgaggcgctggccgggtacgagctgcccattcttgagtcccgtatcacgcagcgcgtgagctacccaggcactgccgccgccggcacaaccgttcttgaatcagaacccgagggcgacgctgcccgcgaggtccaggcgctggccgctgaaattaaatcaaaactcatttgagttaatgaggtaaagagaaaatgagcaaaagcacaaacacgctaagtgccggccgtccgagcgcacgcagcagcaaggctgcaacgttggccagcctggcagacacgccagccatgaagcgggtcaactttcagttgccggcggaggatcacaccaagctgaagatgtacgcggtacgccaaggcaagaccattaccgagctgctatctgaatacatcgcgcagctaccagagtaaatgagcaaatgaataaatgagtagatgaattttagcggctaaaggaggcggcatggaaaatcaagaacaaccaggcaccgacgccgtggaatgccccatgtgtggaggaacgggcggttggccaggcgtaagcggctgggttgtctgccggccctgcaatggcactggaacccccaagcccgaggaatcggcgtgacggtcgcaaaccatccggcccggtacaaatcggcgcggcgctgggtgatgacctggtggagaagttgaaggccgcgcaggccgcccagcggcaacgcatcgaggcagaagcacgccccggtgaatcgtggcaagcggccgctgatcgaatccgcaaagaatcccggcaaccgccggcagccggtgcgccgtcgattaggaagccgcccaagggcgacgagcaaccagattttttcgttccgatgctctatgacgtgggcacccgcgatagtcgcagcatcatggacgtggccgttttccgtctgtcgaagcgtgaccgacgagctggcgaggtgatccgctacgagcttccagacgggcacgtagaggtttccgcagggccggccggcatggccagtgtgtgggattacgacctggtactgatggcggtttcccatctaaccgaatccatgaaccgataccgggaagggaagggagacaagcccggccgcgtgttccgtccacacgttgcggacgtactcaagttctgccggcgagccgatggcggaaagcagaaagacgacctggtagaaacctgcattcggttaaacaccacgcacgttgccatgcagcgtacgaagaaggccaagaacggccgcctggtgacggtatccgagggtgaagccttgattagccgctacaagatcgtaaagagcgaaaccgggcggccggagtacatcgagatcgagctagctgattggatgtaccgcgagatcacagaaggcaagaacccggacgtgctgacggttcaccccgattactttttgatcgatcccggcatcggccgttttctctaccgcctggcacgccgcgccgcaggcaaggcagaagccagatggttgttcaagacgatctacgaacgcagtggcagcgccggagagttcaagaagttctgtttcaccgtgcgcaagctgatcgggtcaaatgacctgccggagtacgatttgaaggaggaggcggggcaggctggcccgatcctagtcatgcgctaccgcaacctgatcgagggcgaagcatccgccggttcctaatgtacggagcagatgctagggcaaattgccctagcaggggaaaaaggtcgaaaaggtctctttcctgtggatagcacgtacattgggaacccaaagccgtacattgggaaccggaacccgtacattgggaacccaaagccgtacattgggaaccggtcacacatgtaagtgactgatataaaagagaaaaaaggcgatttttccgcctaaaactctttaaaacttattaaaactcttaaaacccgcctggcctgtgcataactgtctggccagcgcacagccgaagagctgcaaaaagcgcctacccttcggtcgctgcgctccctacgccccgccgcttcgcgtcggcctatcgcggccgctggccgctcaaaaatggctggcctacggccaggcaatctaccagggcgcggacaagccgcgccgtcgccactcgaccgccggcgcccacatcaaggcaccctgcctcgcgcgtttcggtgatgacggtgaaaacctctgacacatgcagctcccggagacggtcacagcttgtctgtaagcggatgccgggagcagacaagcccgtcagggcgcgtcagcgggtgttggcgggtgtcggggcgcagccatgacccagtcacgtagcgatagcggagtgtatactggcttaactatgcggcatcagagcagattgtactgagagtgcaccatatgcggtgtgaaataccgcacagatgcgtaaggagaaaataccgcatcaggcgctcttccgcttcctcgctcactgactcgctgcgctcggtcgttcggctgcggcgagcggtatcagctcactcaaaggcggtaatacggttatccacagaatcaggggataacgcaggaaagaacatgtgagcaaaaggccagcaaaaggccaggaaccgtaaaaaggccgcgttgctggcgtttttccataggctccgcccccctgacgagcatcacaaaaatcgacgctcaagtcagaggtggcgaaacccgacaggactataaagataccaggcgtttccccctggaagctccctcgtgcgctctcctgttccgaccctgccgcttaccggatacctgtccgcctttctcccttcgggaagcgtggcgctttctcatagctcacgctgtaggtatctcagttcggtgtaggtcgttcgctccaagctgggctgtgtgcacgaaccccccgttcagcccgaccgctgcgccttatccggtaactatcgtcttgagtccaacccggtaagacacgacttatcgccactggcagcagccactggtaacaggattagcagagcgaggtatgtaggcggtgctacagagttcttgaagtggtggcctaactacggctacactagaaggacagtatttggtatctgcgctctgctgaagccagttaccttcggaaaaagagttggtagctcttgatccggcaaacaaaccaccgctggtagcggtggtttttttgtttgcaagcagcagattacgcgcagaaaaaaaggatctcaagaagatcctttgatcttttctacggggtctgacgctcagtggaacgaaaactcacgttaagggattttggtcatgcatgatatatctcccaatttgtgtagggcttattatgcacgcttaaaaataataaaagcagacttgacctgatagtttggctgtgagcaattatgtgcttagtgcatctaatcgcttgagttaacgccggcgaagcggcgtcggcttgaacgaatttctagctagacattatttgccgactaccttggtgatctcgcctttcacgtagtggacaaattcttccaactgatctgcgcgcgaggccaagcgatcttcttcttgtccaagataagcctgtctagcttcaagtatgacgggctgatactgggccggcaggcgctccattgcccagtcggcagcgacatccttcggcgcgattttgccggttactgcgctgtaccaaatgcgggacaacgtaagcactacatttcgctcatcgccagcccagtcgggcggcgagttccatagcgttaaggtttcatttagcgcctcaaatagatcctgttcaggaaccggatcaaagagttcctccgccgctggacctaccaaggcaacgctatgttctcttgcttttgtcagcaagatagccagatcaatgtcgatcgtggctggctcgaagatacctgcaagaatgtcattgcgctgccattctccaaattgcagttcgcgcttagctggataacgccacggaatgatgtcgtcgtgcacaacaatggtgacttctacagcgcggagaatctcgctctctccaggggaagccgaagtttccaaaaggtcgttgatcaaagctcgccgcgttgtttcatcaagccttacggtcaccgtaaccagcaaatcaatatcactgtgtggcttcaggccgccatccactgcggagccgtacaaatgtacggccagcaacgtcggttcgagatggcgctcgatgacgccaactacctctgatagttgagtcgatacttcggcgatcaccgcttcccccatgatgtttaactttgttttagggcgactgccctgctgcgtaacatcgttgctgctccataacatcaaacatcgacccacggcgtaacgcgcttgctgcttggatgcccgaggcatagactgtaccccaaaaaaacatgtcataacaagaagccatgaaaaccgccactgcgccgttaccaccgctgcgttcggtcaaggttctggaccagttgcgtgacggcagttacgctacttgcattacagcttacgaaccgaacgaggcttatgtccactgggttcgtgcccgaattgatcacaggcagcaacgctctgtcatcgttacaatcaacatgctaccctccgcgagatcatccgtgtttcaaacccggcagcttagttgccgttcttccgaatagcatcggtaacatgagcaaagtctgccgccttacaacggctctcccgctgacgccgtcccggactgatgggctgcctgtatcgagtggtgattttgtgccgagctgccggtcggggagctgttggctggctggtggcaggatatattgtggtgtaaacaaattgacgcttagacaacttaataacacattgcggacgtttttaatgtactgaattaacgccgaattgctctagccaatacgcaaaccgcctctccccgcgcgttggccgattcattaatgcagctggcacgacaggtttcccgactggaaagcgggcagtgagcgcaacgcaattaatgtgagttagctcactcattaggcaccccaggctttacactttatgcttccggctcgtatgttgtgtggaattgtgagcggataacaatttcacacaggaaacagctatgacatgattacgaattcaaaaattacggatatgaatataggcatatccgtatccgaattatccgtttgacagctagcaacgattgtacaattgcttctttaaaaaaggaagaaagaaagaaagaaaagaatcaacatcagcgttaacaaacggccccgttacggcccaaacggtcatatagagtaacggcgttaagcgttgaaagactcctatcgaaatacgtaaccgcaaacgtgtcatagtcagatcccctcttccttcaccgcctcaaacacaaaaataatcttctacagcctatatatacaacccccccttctatctctcctttctcacaattcatcatctttctttctctacccccaattttaagaaatcctctcttctcctcttcattttcaaggtaaatctctctctctctctctctctctgttattccttgttttaattaggtatgtattattgctagtttgttaatctgcttatcttatgtatgccttatgtgaatatctttatcttgttcatctcatccgtttagaagctataaatttgttgatttgactgtgtatctacacgtggttatgtttatatctaatcagatatgaatttcttcatattgttgcgtttgtgtgtaccaatccgaaatcgttgatttttttcatttaatcgtgtagctaattgtacgtatacatatggatctacgtatcaattgttcatctgtttgtgtttgtatgtatacagatctgaaaacatcacttctctcatctgattgtgttgttacatacatagatatagatctgttatatcattttttttattaattgtgtatatatatatgtgcatagatctggattacatgattgtgattatttacatgattttgttatttacgtatgtatatatgtagatctggactttttggagttgttgacttgattgtatttgtgtgtgtatatgtgtgttctgatcttgatatgttatgtatgtgcagcgaattcggcgcgccatggataagaagtactctatcggactcgatatcggaactaactctgtgggatgggctgtgatcaccgatgagtacaaggtgccatctaagaagttcaaggttctcggaaacaccgataggcactctatcaagaaaaaccttatcggtgctctcctcttcgattctggtgaaactgctgaggctaccagactcaagagaaccgctagaagaaggtacaccagaagaaagaacaggatctgctacctccaagagatcttctctaacgagatggctaaagtggatgattcattcttccacaggctcgaagagtcattcctcgtggaagaagataagaagcacgagaggcaccctatcttcggaaacatcgttgatgaggtggcataccacgagaagtaccctactatctaccacctcagaaagaagctcgttgattctactgataaggctgatctcaggctcatctacctcgctctcgctcacatgatcaagttcagaggacacttcctcatcgagggtgatctcaaccctgataactctgatgtggataagttgttcatccagctcgtgcagacctacaaccagcttttcgaagagaaccctatcaacgcttcaggtgtggatgctaaggctatcctctctgctaggctctctaagtcaagaaggcttgagaacctcattgctcagctccctggtgagaagaagaacggacttttcggaaacttgatcgctctctctctcggactcacccctaacttcaagtctaacttcgatctcgctgaggatgcaaagctccagctctcaaaggatacctacgatgatgatctcgataacctcctcgctcagatcggagatcagtacgctgatttgttcctcgctgctaagaacctctctgatgctatcctcctcagtgatatcctcagagtgaacaccgagatcaccaaggctccactctcagcttctatgatcaagagatacgatgagcaccaccaggatctcacacttctcaaggctcttgttagacagcagctcccagagaagtacaaagagattttcttcgatcagtctaagaacggatacgctggttacatcgatggtggtgcatctcaagaagagttctacaagttcatcaagcctatcctcgagaagatggatggaaccgaggaactcctcgtgaagctcaatagagaggatcttctcagaaagcagaggaccttcgataacggatctatccctcatcagatccacctcggagagttgcacgctatccttagaaggcaagaggatttctacccattcctcaaggataacagggaaaagattgagaagattctcaccttcagaatcccttactacgtgggacctctcgctagaggaaactcaagattcgcttggatgaccagaaagtctgaggaaaccatcaccccttggaacttcgaagaggtggtggataagggtgctagtgctcagtctttcatcgagaggatgaccaacttcgataagaaccttccaaacgagaaggtgctccctaagcactctttgctctacgagtacttcaccgtgtacaacgagttgaccaaggttaagtacgtgaccgagggaatgaggaagcctgcttttttgtcaggtgagcaaaagaaggctatcgttgatctcttgttcaagaccaacagaaaggtgaccgtgaagcagctcaaagaggattacttcaagaaaatcgagtgcttcgattcagttgagatttctggtgttgaggataggttcaacgcatctctcggaacctaccacgatctcctcaagatcattaaggataaggatttcttggataacgaggaaaacgaggatatcttggaggatatcgttcttaccctcaccctctttgaagatagagagatgattgaagaaaggctcaagacctacgctcatctcttcgatgataaggtgatgaagcagttgaagagaagaagatacactggttggggaaggctctcaagaaagctcattaacggaatcagggataagcagtctggaaagacaatccttgatttcctcaagtctgatggattcgctaacagaaacttcatgcagctcatccacgatgattctctcacctttaaagaggatatccagaaggctcaggtttcaggacagggtgatagtctccatgagcatatcgctaacctcgctggatctcctgcaatcaagaagggaatcctccagactgtgaaggttgtggatgagttggtgaaggtgatgggaaggcataagcctgagaacatcgtgatcgaaatggctagagagaaccagaccactcagaagggacagaagaactctagggaaaggatgaagaggatcgaggaaggtatcaaagagcttggatctcagatcctcaaagagcaccctgttgagaacactcagctccagaatgagaagctctacctctactacctccagaacggaagggatatgtatgtggatcaagagttggatatcaacaggctctctgattacgatgttgatcatatcgtgccacagtcattcttgaaggatgattctatcgataacaaggtgctcaccaggtctgataagaacaggggtaagagtgataacgtgccaagtgaagaggttgtgaagaaaatgaagaactattggaggcagctcctcaacgctaagctcatcactcagagaaagttcgataacttgactaaggctgagaggggaggactctctgaattggataaggcaggattcatcaagaggcagcttgtggaaaccaggcagatcactaagcacgttgcacagatcctcgattctaggatgaacaccaagtacgatgagaacgataagttgatcagggaagtgaaggttatcaccctcaagtcaaagctcgtgtctgatttcagaaaggatttccaattctacaaggtgagggaaatcaacaactaccaccacgctcacgatgcttaccttaacgctgttgttggaaccgctctcatcaagaagtatcctaagctcgagtcagagttcgtgtacggtgattacaaggtgtacgatgtgaggaagatgatcgctaagtctgagcaagagatcggaaaggctaccgctaagtatttcttctactctaacatcatgaatttcttcaagaccgagattaccctcgctaacggtgagatcagaaagaggccactcatcgagacaaacggtgaaacaggtgagatcgtgtgggataagggaagggatttcgctaccgttagaaaggtgctctctatgccacaggtgaacatcgttaagaaaaccgaggtgcagaccggtggattctctaaagagtctatcctccctaagaggaactctgataagctcattgctaggaagaaggattgggaccctaagaaatacggtggtttcgattctcctaccgtggcttactctgttctcgttgtggctaaggttgagaagggaaagagtaagaagctcaagtctgttaaggaacttctcggaatcactatcatggaaaggtcatctttcgagaagaacccaatcgatttcctcgaggctaagggatacaaagaggttaagaaggatctcatcatcaagctcccaaagtactcactcttcgaactcgagaacggtagaaagaggatgctcgcttctgctggtgagcttcaaaagggaaacgagcttgctctcccatctaagtacgttaactttctttacctcgcttctcactacgagaagttgaagggatctccagaagataacgagcagaagcaacttttcgttgagcagcacaagcactacttggatgagatcatcgagcagatctctgagttctctaaaagggtgatcctcgctgatgcaaacctcgataaggtgttgtctgcttacaacaagcacagagataagcctatcagggaacaggcagagaacatcatccatctcttcacccttaccaacctcggtgctcctgctgctttcaagtacttcgatacaaccatcgataggaagagatacacctctaccaaagaagtgctcgatgctaccctcatccatcagtctatcactggactctacgagactaggatcgatctctcacagctcggtggtgattcaagggctgatcctaagaagaagaggaaggtttgaggcgcgccgagctccaggcctcccagctttcgtccgtatcatcggtttcgacaacgttcgtcaagttcaatgcatcagtttcattgcccacacaccagaatcctactaagtttgagtattatggcattggaaaagctgttttcttctatcatttgttctgcttgtaatttactgtgttctttcagtttttgttttcggacatcaaaatgcaaatggatggataagagttaataaatgatatggtccttttgttcattctcaaattattattatctgttgtttttactttaatgggttgaatttaagtaagaaaggaactaacagtgtgatattaaggtgcaatgttagacatataaaacagtctttcacctctctttggttatgtcttgaattggtttgtttcttcacttatctgtgtaatcaagtttactatgagtctatgatcaagtaattatgcaatcaagttaagtacagtataggcttgagctccctaggctttttttcttcttcttcgttcatacagtttttttttgtttatcagcttacattttcttgaaccgtagctttcgttttcttctttttaactttccattcggagtttttgtatcttgtttcatagtttgtcccaggattagaatgattaggcatcgaaccttcaagaatttgattgaataaaacatcttcattcttaagatatgaagataatcttcaaaaggcccctgggaatctgaaagaagagaagcaggcccatttatatgggaaagaacaatagtatttcttatataggcccatttaagttgaaaacaatcttcaaaagtcccacatcgcttagataagaaaacgaagctgagtttatatacagctagagtcgaagtagtgattggaagcaagagacgttctagggttttagagctagaaatagcaagttaaaataaggctagtccgttatcaacttgaaaaagtggcaccgagtcggtgctttttttctagacccagctttcttgtacaaagttggcattacctaggcccgggcctgaggacgcgtccatggttaattaagacgtccggaccgactagtggatcctctagagtcgacctgcaggcatgcaagcttcttcgtcaacatggtggagcacgacacgcttgtctactccaaaaatatcaaagatacagtctcagaagaccaaagggcaattgagacttttcaacaaagggtaatatccggaaacctcctcggattccattgcccagctatctgtcactttattgtgaagatagtggaaaaggaaggtggctcctacaaatgccatcattgcgataaaggaaaggccatcgttgaagatgcctctgccgacagtggtcccaaagatggacccccacccacgaggagcatcgtggaaaaagaagacgttccaaccacgtcttcaaagcaagtggattgatgtgatatctccactgacgtaagggatgacgcacaatcaatcccactatccttcgcaagacccttttaagggggaagttcatttcatttggagaggacacgctgaaatcaccagtctctctgtacaaatcnatctctctctataatattgtgtaagtagttcccagataagggaattagggttcttatagggtttcgctcagctgttgagcatataagaaacccttagtcgatagatctgttggggatctaccatgagcccagaacgacgcccggccgacatccgccgtgccaccgaggcggacatgccggcggtctgcaccatcgtcaaccactacatcgagacaagcacggtcaacttccgtaccgagccgcaggaaccgcaggagtggacggacgacctcgtccgtctgcgggagcgctatccctggctcgtcgccgaggtggacggcgaggtcgccggcatcgcctacgcgggcccctggaaggcacgcaacgcctacgactggacggccgagtcgaccgtgtacgtctccccccgccaccagcggacgggactgggctccacgctctacacccacctgctgaagtccctggaggcacagggcttcaagagcgtggtcgctgtcatcgggctgcccaacgacccgagcgtgcgcatgcacgaggcgctcggatatgccccccgcggcatgctgcgggcggccggcttcaagcacgggaactggcatgacgtgggtttctggcagctggacttcagcctgccggtaccgccccgtccggtcctgcccgtcaccgagatctgatgacccaacttagtatgtatttgtatttgtaaaatacttctatcaataaaatttctaattcctaaaaccaaaatccaggggtaccgaacaagcttggcactggccgtcgttttacaacgtcgtgactgggaaaaccctggcgttacccaacttaatcgccttgcagcacatccccctttcgccagctggcgtaatagcgaagaggcccgcaccgatcgcccttcccaacagttgcgcagcctgaatggcgaatgagcttgagcttggatcagattgtcgtttcccgccttcagtttaaactatcagtgtttgacaggatatattggcgggtaaacctaagagaaaagagcgtttattagaataacggatatttaaaagggcgtgaaaaggtttatccgttcgtccatttgtatgtgcatgccaaccacagggttcccctcgggatcaa

SEQ ID NO: 164 - DNA, 14548 bp, artificial sequence
  synthetic construct
  misc_feature (13426)..(13426): n is a, c, g, or t
agtactttgatccaacccctccgctgctatagtgcagtcggcttctgacgttcagtgcagccgtcttctgaaaacgacatgtcgcacaagtcctaagttacgcgacaggctgccgccctgcccttttcctggcgttttcttgtcgcgtgttttagtcgcataaagtagaatacttgcgactagaaccggagacattacgccatgaacaagagcgccgccgctggcctgctgggctatgcccgcgtcagcaccgacgaccaggacttgaccaaccaacgggccgaactgcacgcggccggctgcaccaagctgttttccgagaagatcaccggcaccaggcgcgaccgcccggagctggccaggatgcttgaccacctacgccctggcgacgttgtgacagtgaccaggctagaccgcctggcccgcagcacccgcgacctactggacattgccgagcgcatccaggaggccggcgcgggcctgcgtagcctggcagagccgtgggccgacaccaccacgccggccggccgcatggtgttgaccgtgttcgccggcattgccgagttcgagcgttccctaatcatcgaccgcacccggagcgggcgcgaggccgccaaggcccgaggcgtgaagtttggcccccgccctaccctcaccccggcacagatcgcgcacgcccgcgagctgatcgaccaggaaggccgcaccgtgaaagaggcggctgcactgcttggcgtgcatcgctcgaccctgtaccgcgcacttgagcgcagcgaggaagtgacgcccaccgaggccaggcggcgcggtgccttccgtgaggacgcattgaccgaggccgacgccctggcggccgccgagaatgaacgccaagaggaacaagcatgaaaccgcaccaggacggccaggacgaaccgtttttcattaccgaagagatcgaggcggagatgatcgcggccgggtacgtgttcgagccgcccgcgcacgtctcaaccgtgcggctgcatgaaatcctggccggtttgtctgatgccaagctggcggcctggccggccagcttggccgctgaagaaaccgagcgccgccgtctaaaaaggtgatgtgtatttgagtaaaacagcttgcgtcatgcggtcgctgcgtatatgatgcgatgagtaaataaacaaatacgcaaggggaacgcatgaaggttatcgctgtacttaaccagaaaggcgggtcaggcaagacgaccatcgcaacccatctagcccgcgccctgcaactcgccggggccgatgttctgttagtcgattccgatccccagggcagtgcccgcgattgggcggccgtgcgggaagatcaaccgctaaccgttgtcggcatcgaccgcccgacgattgaccgcgacgtgaaggccatcggccggcgcgacttcgtagtgatcgacggagcgccccaggcggcggacttggctgtgtccgcgatcaaggcagccgacttcgtgctgattccggtgcagccaagcccttacgacatatgggccaccgccgacctggtggagctggttaagcagcgcattgaggtcacggatggaaggctacaagcggcctttgtcgtgtcgcgggcgatcaaaggcacgcgcatcggcggtgaggttgccgaggcgctggccgggtacgagctgcccattcttgagtcccgtatcacgcagcgcgtgagctacccaggcactgccgccgccggcacaaccgttcttgaatcagaacccgagggcgacgctgcccgcgaggtccaggcgctggccgctgaaattaaatcaaaactcatttgagttaatgaggtaaagagaaaatgagcaaaagcacaaacacgctaagtgccggccgtccgagcgcacgcagcagcaaggctgcaacgttggccagcctggcagacacgccagccatgaagcgggtcaactttcagttgccggcggaggatcacaccaagctgaagatgtacgcggtacgccaaggcaagaccattaccgagctgctatctgaatacatcgcgcagctaccagagtaaatgagcaaatgaataaatgagtagatgaattttagcggctaaaggaggcggcatggaaaatcaagaacaaccaggcaccgacgccgtggaatgccccatgtgtggaggaacgggcggttggccaggcgtaagcggctgggttgtctgccggccctgcaatggcactggaacccccaagcccgaggaatcggcgtgacggtcgcaaaccatccggcccggtacaaatcggcgcggcgctgggtgatgacctggtggagaagttgaaggccgcgcaggccgcccagcggcaacgcatcgaggcagaagcacgccccggtgaatcgtggcaagcggccgctgatcgaatccgcaaagaatcccggcaaccgccggcagccggtgcgccgtcgattaggaagccgcccaagggcgacgagcaaccagattttttcgttccgatgctctatgacgtgggcacccgcgatagtcgcagcatcatggacgtggccgttttccgtctgtcgaagcgtgaccgacgagctggcgaggtgatccgctacgagcttccagacgggcacgtagaggtttccgcagggccggccggcatggccagtgtgtgggattacgacctggtactgatggcggtttcccatctaaccgaatccatgaaccgataccgggaagggaagggagacaagcccggccgcgtgttccgtccacacgttgcggacgtactcaagttctgccggcgagccgatggcggaaagcagaaagacgacctggtagaaacctgcattcggttaaacaccacgcacgttgccatgcagcgtacgaagaaggccaagaacggccgcctggtgacggtatccgagggtgaagccttgattagccgctacaagatcgtaaagagcgaaaccgggcggccggagtacatcgagatcgagctagctgattggatgtaccgcgagatcacagaaggcaagaacccggacgtgctgacggttcaccccgattactttttgatcgatcccggcatcggccgttttctctaccgcctggcacgccgcgccgcaggcaaggcagaagccagatggttgttcaagacgatctacgaacgcagtggcagcgccggagagttcaagaagttctgtttcaccgtgcgcaagctgatcgggtcaaatgacctgccggagtacgatttgaaggaggaggcggggcaggctggcccgatcctagtcatgcgctaccgcaacctgatcgagggcgaagcatccgccggttcctaatgtacggagcagatgctagggcaaattgccctagcaggggaaaaaggtcgaaaaggtctctttcctgtggatagcacgtacattgggaacccaaagccgtacattgggaaccggaacccgtacattgggaacccaaagccgtacattgggaaccggtcacacatgtaagtgactgatataaaagagaaaaaaggcgatttttccgcctaaaactctttaaaacttattaaaactcttaaaacccgcctggcctgtgcataactgtctggccagcgcacagccgaagagctgcaaaaagcgcctacccttcggtcgctgcgctccctacgccccgccgcttcgcgtcggcctatcgcggccgctggccgctcaaaaatggctggcctacggccaggcaatctaccagggcgcggacaagccgcgccgtcgccactcgaccgccggcgcccacatcaaggcaccctgcctcgcgcgtttcggtgatgacggtgaaaacctctgacacatgcagctcccggagacggtcacagcttgtctgtaagcggatgccgggagcagacaagcccgtcagggcgcgtcagcgggtgttggcgggtgtcggggcgcagccatgacccagtcacgtagcgatagcggagtgtatactggcttaactatgcggcatcagagcagattgtactgagagtgcaccatatgcggtgtgaaataccgcacagatgcgtaaggagaaaataccgcatcaggcgctcttccgcttcctcgctcactgactcgctgcgctcggtcgttcggctgcggcgagcggtatcagctcactcaaaggcggtaatacggttatccacagaatcaggggataacgcaggaaagaacatgtgagcaaaaggccagcaaaaggccaggaaccgtaaaaaggccgcgttgctggcgtttttccataggctccgcccccctgacgagcatcacaaaaatcgacgctcaagtcagaggtggcgaaacccgacaggactataaagataccaggcgtttccccctggaagctccctcgtgcgctctcctgttccgaccctgccgcttaccggatacctgtccgcctttctcccttcgggaagcgtggcgctttctcatagctcacgctgtaggtatctcagttcggtgtaggtcgttcgctccaagctgggctgtgtgcacgaaccccccgttcagcccgaccgctgcgccttatccggtaactatcgtcttgagtccaacccggtaagacacgacttatcgccactggcagcagccactggtaacaggattagcagagcgaggtatgtaggcggtgctacagagttcttgaagtggtggcctaactacggctacactagaaggacagtatttggtatctgcgctctgctgaagccagttaccttcggaaaaagagttggtagctcttgatccggcaaacaaaccaccgctggtagcggtggtttttttgtttgcaagcagcagattacgcgcagaaaaaaaggatctcaagaagatcctttgatcttttctacggggtctgacgctcagtggaacgaaaactcacgttaagggattttggtcatgcatgatatatctcccaatttgtgtagggcttattatgcacgcttaaaaataataaaagcagacttgacctgatagtttggctgtgagcaattatgtgcttagtgcatctaatcgcttgagttaacgccggcgaagcggcgtcggcttgaacgaatttctagctagacattatttgccgactaccttggtgatctcgcctttcacgtagtggacaaattcttccaactgatctgcgcgcgaggccaagcgatcttcttcttgtccaagataagcctgtctagcttcaagtatgacgggctgatactgggccggcaggcgctccattgcccagtcggcagcgacatccttcggcgcgattttgccggttactgcgctgtaccaaatgcgggacaacgtaagcactacatttcgctcatcgccagcccagtcgggcggcgagttccatagcgttaaggtttcatttagcgcctcaaatagatcctgttcaggaaccggatcaaagagttcctccgccgctggacctaccaaggcaacgctatgttctcttgcttttgtcagcaagatagccagatcaatgtcgatcgtggctggctcgaagatacctgcaagaatgtcattgcgctgccattctccaaattgcagttcgcgcttagctggataacgccacggaatgatgtcgtcgtgcacaacaatggtgacttctacagcgcggagaatctcgctctctccaggggaagccgaagtttccaaaaggtcgttgatcaaagctcgccgcgttgtttcatcaagccttacggtcaccgtaaccagcaaatcaatatcactgtgtggcttcaggccgccatccactgcggagccgtacaaatgtacggccagcaacgtcggttcgagatggcgctcgatgacgccaactacctctgatagttgagtcgatacttcggcgatcaccgcttcccccatgatgtttaactttgttttagggcgactgccctgctgcgtaacatcgttgctgctccataacatcaaacatcgacccacggcgtaacgcgcttgctgcttggatgcccgaggcatagactgtaccccaaaaaaacatgtcataacaagaagccatgaaaaccgccactgcgccgttaccaccgctgcgttcggtcaaggttctggaccagttgcgtgacggcagttacgctacttgcattacagcttacgaaccgaacgaggcttatgtccactgggttcgtgcccgaattgatcacaggcagcaacgctctgtcatcgttacaatcaacatgctaccctccgcgagatcatccgtgtttcaaacccggcagcttagttgccgttcttccgaatagcatcggtaacatgagcaaagtctgccgccttacaacggctctcccgctgacgccgtcccggactgatgggctgcctgtatcgagtggtgattttgtgccgagctgccggtcggggagctgttggctggctggtggcaggatatattgtggtgtaaacaaattgacgcttagacaacttaataacacattgcggacgtttttaatgtactgaattaacgccgaattgctctagccaatacgcaaaccgcctctccccgcgcgttggccgattcattaatgcagctggcacgacaggtttcccgactggaaagcgggcagtgagcgcaacgcaattaatgtgagttagctcactcattaggcaccccaggctttacactttatgcttccggctcgtatgttgtgtggaattgtgagcggataacaatttcacacaggaaacagctatgacatgattacgaattcaaaaattacggatatgaatataggcatatccgtatccgaattatccgtttgacagctagcaacgattgtacaattgcttctttaaaaaaggaagaaagaaagaaagaaaagaatcaacatcagcgttaacaaacggccccgttacggcccaaacggtcatatagagtaacggcgttaagcgttgaaagactcctatcgaaatacgtaaccgcaaacgtgtcatagtcagatcccctcttccttcaccgcctcaaacacaaaaataatcttctacagcctatatatacaacccccccttctatctctcctttctcacaattcatcatctttctttctctacccccaattttaagaaatcctctcttctcctcttcattttcaaggtaaatctctctctctctctctctctctgttattccttgttttaattaggtatgtattattgctagtttgttaatctgcttatcttatgtatgccttatgtgaatatctttatcttgttcatctcatccgtttagaagctataaatttgttgatttgactgtgtatctacacgtggttatgtttatatctaatcagatatgaatttcttcatattgttgcgtttgtgtgtaccaatccgaaatcgttgatttttttcatttaatcgtgtagctaattgtacgtatacatatggatctacgtatcaattgttcatctgtttgtgtttgtatgtatacagatctgaaaacatcacttctctcatctgattgtgttgttacatacatagatatagatctgttatatcattttttttattaattgtgtatatatatatgtgcatagatctggattacatgattgtgattatttacatgattttgttatttacgtatgtatatatgtagatctggactttttggagttgttgacttgattgtatttgtgtgtgtatatgtgtgttctgatcttgatatgttatgtatgtgcagcgaattcggcgcgccatggataagaagtactctatcggactcgatatcggaactaactctgtgggatgggctgtgatcaccgatgagtacaaggtgccatctaagaagttcaaggttctcggaaacaccgataggcactctatcaagaaaaaccttatcggtgctctcctcttcgattctggtgaaactgctgaggctaccagactcaagagaaccgctagaagaaggtacaccagaagaaagaacaggatctgctacctccaagagatcttctctaacgagatggctaaagtggatgattcattcttccacaggctcgaagagtcattcctcgtggaagaagataagaagcacgagaggcaccctatcttcggaaacatcgttgatgaggtggcataccacgagaagtaccctactatctaccacctcagaaagaagctcgttgattctactgataaggctgatctcaggctcatctacctcgctctcgctcacatgatcaagttcagaggacacttcctcatcgagggtgatctcaaccctgataactctgatgtggataagttgttcatccagctcgtgcagacctacaaccagcttttcgaagagaaccctatcaacgcttcaggtgtggatgctaaggctatcctctctgctaggctctctaagtcaagaaggcttgagaacctcattgctcagctccctggtgagaagaagaacggacttttcggaaacttgatcgctctctctctcggactcacccctaacttcaagtctaacttcgatctcgctgaggatgcaaagctccagctctcaaaggatacctacgatgatgatctcgataacctcctcgctcagatcggagatcagtacgctgatttgttcctcgctgctaagaacctctctgatgctatcctcctcagtgatatcctcagagtgaacaccgagatcaccaaggctccactctcagcttctatgatcaagagatacgatgagcaccaccaggatctcacacttctcaaggctcttgttagacagcagctcccagagaagtacaaagagattttcttcgatcagtctaagaacggatacgctggttacatcgatggtggtgcatctcaagaagagttctacaagttcatcaagcctatcctcgagaagatggatggaaccgaggaactcctcgtgaagctcaatagagaggatcttctcagaaagcagaggaccttcgataacggatctatccctcatcagatccacctcggagagttgcacgctatccttagaaggcaagaggatttctacccattcctcaaggataacagggaaaagattgagaagattctcaccttcagaatcccttactacgtgggacctctcgctagaggaaactcaagattcgcttggatgaccagaaagtctgaggaaaccatcaccccttggaacttcgaagaggtggtggataagggtgctagtgctcagtctttcatcgagaggatgaccaacttcgataagaaccttccaaacgagaaggtgctccctaagcactctttgctctacgagtacttcaccgtgtacaacgagttgaccaaggttaagtacgtgaccgagggaatgaggaagcctgcttttttgtcaggtgagcaaaagaaggctatcgttgatctcttgttcaagaccaacagaaaggtgaccgtgaagcagctcaaagaggattacttcaagaaaatcgagtgcttcgattcagttgagatttctggtgttgaggataggttcaacgcatctctcggaacctaccacgatctcctcaagatcattaaggataaggatttcttggataacgaggaaaacgaggatatcttggaggatatcgttcttaccctcaccctctttgaagatagagagatgattgaagaaaggctcaagacctacgctcatctcttcgatgataaggtgatgaagcagttgaagagaagaagatacactggttggggaaggctctcaagaaagctcattaacggaatcagggataagcagtctggaaagacaatccttgatttcctcaagtctgatggattcgctaacagaaacttcatgcagctcatccacgatgattctctcacctttaaagaggatatccagaaggctcaggtttcaggacagggtgatagtctccatgagcatatcgctaacctcgctggatctcctgcaatcaagaagggaatcctccagactgtgaaggttgtggatgagttggtgaaggtgatgggaaggcataagcctgagaacatcgtgatcgaaatggctagagagaaccagaccactcagaagggacagaagaactctagggaaaggatgaagaggatcgaggaaggtatcaaagagcttggatctcagatcctcaaagagcaccctgttgagaacactcagctccagaatgagaagctctacctctactacctccagaacggaagggatatgtatgtggatcaagagttggatatcaacaggctctctgattacgatgttgatcatatcgtgccacagtcattcttgaaggatgattctatcgataacaaggtgctcaccaggtctgataagaacaggggtaagagtgataacgtgccaagtgaagaggttgtgaagaaaatgaagaactattggaggcagctcctcaacgctaagctcatcactcagagaaagttcgataacttgactaaggctgagaggggaggactctctgaattggataaggcaggattcatcaagaggcagcttgtggaaaccaggcagatcactaagcacgttgcacagatcctcgattctaggatgaacaccaagtacgatgagaacgataagttgatcagggaagtgaaggttatcaccctcaagtcaaagctcgtgtctgatttcagaaaggatttccaattctacaaggtgagggaaatcaacaactaccaccacgctcacgatgcttaccttaacgctgttgttggaaccgctctcatcaagaagtatcctaagctcgagtcagagttcgtgtacggtgattacaaggtgtacgatgtgaggaagatgatcgctaagtctgagcaagagatcggaaaggctaccgctaagtatttcttctactctaacatcatgaatttcttcaagaccgagattaccctcgctaacggtgagatcagaaagaggccactcatcgagacaaacggtgaaacaggtgagatcgtgtgggataagggaagggatttcgctaccgttagaaaggtgctctctatgccacaggtgaacatcgttaagaaaaccgaggtgcagaccggtggattctctaaagagtctatcctccctaagaggaactctgataagctcattgctaggaagaaggattgggaccctaagaaatacggtggtttcgattctcctaccgtggcttactctgttctcgttgtggctaaggttgagaagggaaagagtaagaagctcaagtctgttaaggaacttctcggaatcactatcatggaaaggtcatctttcgagaagaacccaatcgatttcctcgaggctaagggatacaaagaggttaagaaggatctcatcatcaagctcccaaagtactcactcttcgaactcgagaacggtagaaagaggatgctcgcttctgctggtgagcttcaaaagggaaacgagcttgctctcccatctaagtacgttaactttctttacctcgcttctcactacgagaagttgaagggatctccagaagataacgagcagaagcaacttttcgttgagcagcacaagcactacttggatgagatcatcgagcagatctctgagttctctaaaagggtgatcctcgctgatgcaaacctcgataaggtgttgtctgcttacaacaagcacagagataagcctatcagggaacaggcagagaacatcatccatctcttcacccttaccaacctcggtgctcctgctgctttcaagtacttcgatacaaccatcgataggaagagatacacctctaccaaagaagtgctcgatgctaccctcatccatcagtctatcactggactctacgagactaggatcgatctctcacagctcggtggtgattcaagggctgatcctaagaagaagaggaaggtttgaggcgcgccgagctccaggcctcccagctttcgtccgtatcatcggtttcgacaacgttcgtcaagttcaatgcatcagtttcattgcccacacaccagaatcctactaagtttgagtattatggcattggaaaagctgttttcttctatcatttgttctgcttgtaatttactgtgttctttcagtttttgttttcggacatcaaaatgcaaatggatggataagagttaataaatgatatggtccttttgttcattctcaaattattattatctgttgtttttactttaatgggttgaatttaagtaagaaaggaactaacagtgtgatattaaggtgcaatgttagacatataaaacagtctttcacctctctttggttatgtcttgaattggtttgtttcttcacttatctgtgtaatcaagtttactatgagtctatgatcaagtaattatgcaatcaagttaagtacagtataggcttgagctccctaggctttttttcttcttcttcgttcatacagtttttttttgtttatcagcttacattttcttgaaccgtagctttcgttttcttctttttaactttccattcggagtttttgtatcttgtttcatagtttgtcccaggattagaatgattaggcatcgaaccttcaagaatttgattgaataaaacatcttcattcttaagatatgaagataatcttcaaaaggcccctgggaatctgaaagaagagaagcaggcccatttatatgggaaagaacaatagtatttcttatataggcccatttaagttgaaaacaatcttcaaaagtcccacatcgcttagataagaaaacgaagctgagtttatatacagctagagtcgaagtagtgattggccgttaatttgagagtccagttttagagctagaaatagcaagttaaaataaggctagtccgttatcaacttgaaaaagtggcaccgagtcggtgctttttttctagacccagctttcttgtacaaagttggcattacctaggcccgggcctgaggacgcgtccatggttaattaagacgtccggaccgactagtggatcctctagagtcgacctgcaggcatgcaagcttcttcgtcaacatggtggagcacgacacgcttgtctactccaaaaatatcaaagatacagtctcagaagaccaaagggcaattgagacttttcaacaaagggtaatatccggaaacctcctcggattccattgcccagctatctgtcactttattgtgaagatagtggaaaaggaaggtggctcctacaaatgccatcattgcgataaaggaaaggccatcgttgaagatgcctctgccgacagtggtcccaaagatggacccccacccacgaggagcatcgtggaaaaagaagacgttccaaccacgtcttcaaagcaagtggattgatgtgatatctccactgacgtaagggatgacgcacaatcaatcccactatccttcgcaagacccttttaagggggaagttcatttcatttggagaggacacgctgaaatcaccagtctctctgtacaaatcnatctctctctataatattgtgtaagtagttcccagataagggaattagggttcttatagggtttcgctcagctgttgagcatataagaaacccttagtcgatagatctgttggggatctaccatgagcccagaacgacgcccggccgacatccgccgtgccaccgaggcggacatgccggcggtctgcaccatcgtcaaccactacatcgagacaagcacggtcaacttccgtaccgagccgcaggaaccgcaggagtggacggacgacctcgtccgtctgcgggagcgctatccctggctcgtcgccgaggtggacggcgaggtcgccggcatcgcctacgcgggcccctggaaggcacgcaacgcctacgactggacggccgagtcgaccgtgtacgtctccccccgccaccagcggacgggactgggctccacgctctacacccacctgctgaagtccctggaggcacagggcttcaagagcgtggtcgctgtcatcgggctgcccaacgacccgagcgtgcgcatgcacgaggcgctcggatatgccccccgcggcatgctgcgggcggccggcttcaagcacgggaactggcatgacgtgggtttctggcagctggacttcagcctgccggtaccgccccgtccggtcctgcccgtcaccgagatctgatgacccaacttagtatgtatttgtatttgtaaaatacttctatcaataaaatttctaattcctaaaaccaaaatccaggggtaccgaacaagcttggcactggccgtcgttttacaacgtcgtgactgggaaaaccctggcgttacccaacttaatcgccttgcagcacatccccctttcgccagctggcgtaatagcgaagaggcccgcaccgatcgcccttcccaacagttgcgcagcctgaatggcgaatgagcttgagcttggatcagattgtcgtttcccgccttcagtttaaactatcagtgtttgacaggatatattggcgggtaaacctaagagaaaagagcgtttattagaataacggatatttaaaagggcgtgaaaaggtttatccgttcgtccatttgtatgtgcatgccaaccacagggttcccctcgggatcaa

SEQ ID NO: 165 - DNA, 20 bp, artificial sequence
  synthetic construct
gccgttaatttgagagtcca

SEQ ID NO: 166 - DNA, 96 bp, artificial sequence
  synthetic construct
gccgttaatttgagagtccagttttagagctagaaatagcaagttaaaataaggctagtccgttatcaacttgaaaaagtggcaccgagtcggtgc

SEQ ID NO: 167 - DNA, 8 bp, Arabidopsis thaliana
cacgtggc

SEQ ID NO: 168 - DNA, 8 bp, Arabidopsis thaliana
  misc_feature (1)..(1): n is c or t
nacgtggc

SEQ ID NO: 169 - DNA, 8 bp, Arabidopsis thaliana
  misc_feature (1)..(1): n is c, g, or t
  misc_feature (7)..(7): n is g or t
  misc_feature (8)..(8): n is a or c
nacgtgnn

SEQ ID NO: 170 - DNA, 10 bp, Arabidopsis thaliana
gacacgtaga

SEQ ID NO: 171 - DNA, 13 bp, Arabidopsis thaliana
  misc_feature (5)..(10): n is a, c, t, or g
  misc_feature (13)..(13): n is a, c, t, or g
ttccnnnnnnggn

SEQ ID NO: 172 - DNA, 11 bp, Arabidopsis thaliana
ccatttttagt

SEQ ID NO: 173 - DNA, 10 bp, Arabidopsis thaliana
ccatttttgg

SEQ ID NO: 174 - DNA, 18 bp, Arabidopsis thaliana
  misc_feature (1)..(1): n is a, c, t, or g
  misc_feature (4)..(4): n is a, t, or g
  misc_feature (7)..(10): n is a or t
  misc_feature (11)..(12): n is a, c, t, or g
  misc_feature (15)..(15): n is a or t
  misc_feature (18)..(18): n is a, c, t, or g
nttnccnnnnnnggnaan

SEQ ID NO: 175 - DNA, 18 bp, Arabidopsis thaliana
  misc_feature (1)..(2): n is a, c, g, or t
  misc_feature (3)..(3): n is a or t
  misc_feature (4)..(4): n is a, c, g, or t
  misc_feature (8)..(11): n is a or t
  misc_feature (13)..(13): n is a or g
  misc_feature (15)..(16): n is a or t
  misc_feature (18)..(18): n is a, c, g, or t
nnnnccannnntngnnan

SEQ ID NO: 176 - DNA, 16 bp, Arabidopsis thaliana
  misc_feature (3)..(3): n is a or t
  misc_feature (5)..(5): n is c or t
  misc_feature (7)..(10): n is a or t
  misc_feature (12)..(12): n is a or g
  misc_feature (14)..(14): n is a or t
ttncnannnntngnaa

SEQ ID NO: 177 - DNA, 10 bp, Arabidopsis thaliana
ccatttttag

SEQ ID NO: 178 - DNA, 10 bp, Arabidopsis thaliana
ccatttttgg

SEQ ID NO: 179 - DNA, 6 bp, Arabidopsis thaliana
tgtctc

SEQ ID NO: 180 - DNA, 6 bp, Arabidopsis thaliana
tgtctc

SEQ ID NO: 181 - DNA, 9 bp, Arabidopsis thaliana
  misc_feature (5)..(5): n is a or t
caatnattg

SEQ ID NO: 182 - DNA, 9 bp, Arabidopsis thaliana
  misc_feature (5)..(5): n is c or g
caatnattg

SEQ ID NO: 183 - DNA, 9 bp, Arabidopsis thaliana
  misc_feature (5)..(5): n is a, c, t, or g
caatnattg

SEQ ID NO: 184 - DNA, 9 bp, Arabidopsis thaliana
caattatta

SEQ ID NO: 185 - DNA, 7 bp, Arabidopsis thaliana
ctaacca

SEQ ID NO: 186 - DNA, 6 bp, Arabidopsis thaliana
cacatg

SEQ ID NO: 187 - DNA, 6 bp, Arabidopsis thaliana
ggttaa

SEQ ID NO: 188 - DNA, 10 bp, Arabidopsis thaliana
  misc_feature (3)..(8): n is a or t
ccnnnnnngg

SEQ ID NO: 189 - DNA, 18 bp, Arabidopsis thaliana
gtttacataaatggaaaa

SEQ ID NO: 190 - DNA, 18 bp, Arabidopsis thaliana
cttacctttcatggatta

SEQ ID NO: 191 - DNA, 18 bp, Arabidopsis thaliana
ctttccatttttagtaac

SEQ ID NO: 192 - DNA, 8 bp, Arabidopsis thaliana
tggccgac

SEQ ID NO: 193 - DNA, 8 bp, Arabidopsis thaliana
ccacgtgg

SEQ ID NO: 194 - DNA, 8 bp, Arabidopsis thaliana
  misc_feature (3)..(3): n is a or c
aanaatct

SEQ ID NO: 195 - DNA, 10 bp, Arabidopsis thaliana
aaacaatcta

SEQ ID NO: 196 - DNA, 15 bp, Arabidopsis thaliana
aaaaaaaatctatga

SEQ ID NO: 197 - DNA, 7 bp, Arabidopsis thaliana
  misc_feature (5)..(6): n is a, c, t, or g
acacnng

SEQ ID NO: 198 - DNA, 9 bp, Arabidopsis thaliana
taccgacat

SEQ ID NO: 199 - DNA, 9 bp, Arabidopsis thaliana
taccgacat

SEQ ID NO: 200 - DNA, 9 bp, Arabidopsis thaliana
  misc_feature (1)..(1): n is a, g, or t
  misc_feature (2)..(2): n is a or g
  misc_feature (8)..(8): n is a, c, t, or g
  misc_feature (9)..(9): n is a or t
nnccgacnn

SEQ ID NO: 201 - DNA, 8 bp, Arabidopsis thaliana
tttcccgc

SEQ ID NO: 202 - DNA, 8 bp, Arabidopsis thaliana
tttcccgc

SEQ ID NO: 203 - DNA, 9 bp, Arabidopsis thaliana
tctcccgcc

SEQ ID NO: 204 - DNA, 23 bp, Arabidopsis thaliana
ttcaagggggcatgtatcttgaa

SEQ ID NO: 205 - DNA, 23 bp, Arabidopsis thaliana
ttcaagggggcatgtatcttgaa

SEQ ID NO: 206 - DNA, 23 bp, Arabidopsis thaliana
ttcaagggggcatgtatcttgaa

SEQ ID NO: 207 - DNA, 29 bp, Arabidopsis thaliana
ggattcaagggggcatgtatcttgaatcc

SEQ ID NO: 208 - DNA, 11 bp, Arabidopsis thaliana
taagagccgcc

SEQ ID NO: 209 - DNA, 6 bp, Arabidopsis thaliana
gccgcc

SEQ ID NO: 210 - DNA, 9 bp, Arabidopsis thaliana
aaaatatct

SEQ ID NO: 211 - DNA, 6 bp, Arabidopsis thaliana
  misc_feature (1)..(1): n is a or t
  misc_feature (6)..(6): n is a or g
ngatan

SEQ ID NO: 212 - DNA, 8 bp, Arabidopsis thaliana
ccacgtgg

SEQ ID NO: 213 - DNA, 6 bp, Arabidopsis thaliana
cacgtg

SEQ ID NO: 214 - DNA, 6 bp, Arabidopsis thaliana
gccgcc

SEQ ID NO: 215 - DNA, 15 bp, Arabidopsis thaliana
tgtgtggttaatatg

SEQ ID NO: 216 - DNA, 6 bp, Arabidopsis thaliana
ccgtcg

SEQ ID NO: 217 - DNA, 10 bp, Arabidopsis thaliana
  misc_feature (5)..(6): n is a, c, t, or g
agaannttct

SEQ ID NO: 218 - DNA, 6 bp, Arabidopsis thaliana
gataag

SEQ ID NO: 219 - DNA, 10 bp, Arabidopsis thaliana
cgtcaatgaa

SEQ ID NO: 220 - DNA, 13 bp, Arabidopsis thaliana
catacgtcgtcaa

SEQ ID NO: 221 - DNA, 8 bp, Arabidopsis thaliana
  misc_feature (7)..(7): n is c or t
taaatgna

SEQ ID NO: 222 - DNA, 10 bp, Arabidopsis thaliana
acgtcataga

SEQ ID NO: 223 - DNA, 10 bp, Arabidopsis thaliana
tctacgtcac

SEQ ID NO: 224 - DNA, 7 bp, Arabidopsis thaliana
accgaca

SEQ ID NO: 225 - DNA, 12 bp, Arabidopsis thaliana
tctaacctacca

SEQ ID NO: 226 - DNA, 8 bp, Arabidopsis thaliana
  misc_feature (1)..(1): n is a or c
  misc_feature (5)..(5): n is a or t
  misc_feature (7)..(7): n is a or c
naccnanc

SEQ ID NO: 227 - DNA, 8 bp, Arabidopsis thaliana
  misc_feature (1)..(1): n is a or c
  misc_feature (5)..(5): n is a or t
ntccnacc

SEQ ID NO: 228 - DNA, 9 bp, Arabidopsis thaliana
  misc_feature (6)..(6): n is g or c
taactngtt

SEQ ID NO: 229 - DNA, 8 bp, Arabidopsis thaliana
taactaac

SEQ ID NO: 230 - DNA, 7 bp, Arabidopsis thaliana
  misc_feature (2)..(2): n is a or c
  misc_feature (4)..(4): n is a or t
  misc_feature (6)..(6): n is a or c
ancnanc

SEQ ID NO: 231 - DNA, 9 bp, Arabidopsis thaliana
agatcgacg

SEQ ID NO: 232 - DNA, 26 bp, Arabidopsis thaliana
atcttatgtcattgatgacgacctcc

SEQ ID NO: 233 - DNA, 11 bp, Arabidopsis thaliana
tacacttttgg

SEQ ID NO: 234 - DNA, 20 bp, Arabidopsis thaliana
  misc_feature (6)..(6): n is c or t
  misc_feature (10)..(10): n is c or g
  misc_feature (11)..(11): n is a or g
  misc_feature (12)..(12): n is a or c
  misc_feature (14)..(14): n is g or t
  misc_feature (18)..(18): n is c or t
  misc_feature (19)..(20): n is a or c
tgacgnaagnnntnacgnnn

SEQ ID NO: 235 - DNA, 8 bp, Arabidopsis thaliana
cgcggatc

SEQ ID NO: 236 - DNA, 8 bp, Arabidopsis thaliana
gtgatcac

SEQ ID NO: 237 - DNA, 20 bp, Arabidopsis thaliana
ttggttttgatcaaaaccaa

SEQ ID NO: 238 - DNA, 15 bp, Arabidopsis thaliana
taattgactcaatta

SEQ ID NO: 239 - DNA, 5 bp, Arabidopsis thaliana
caaca

SEQ ID NO: 240 - DNA, 6 bp, Arabidopsis thaliana
cacctg

SEQ ID NO: 241 - DNA, 8 bp, Arabidopsis thaliana
catgcatg

SEQ ID NO: 242 - DNA, 9 bp, Arabidopsis thaliana
  misc_feature (2)..(2): n is a, c, g, or t
tncgtacaa

SEQ ID NO: 243 - DNA, 6 bp, Arabidopsis thaliana
actttg

SEQ ID NO: 244 - DNA, 16 bp, Arabidopsis thaliana
aggggcataatggtaa

SEQ ID NO: 245 - DNA, 9 bp, Arabidopsis thaliana
aaaccctaa

SEQ ID NO: 246 - DNA, 8 bp, Arabidopsis thaliana
tgacgtgg

SEQ ID NO: 247 - DNA, 5 bp, Arabidopsis thaliana
ttgac

SEQ ID NO: 248 - DNA, 8 bp, Arabidopsis thaliana
atacgtgt

SEQ ID NO: 249 - DNA, 16 bp, Arabidopsis thaliana
aaaacagaataggaaa

SEQ ID NO: 250 - DNA, 8 bp, Arabidopsis thaliana
aaattaaa

SEQ ID NO: 251 - DNA, 8 bp, Arabidopsis thaliana
aaattagt

SEQ ID NO: 252 - DNA, 8 bp, Arabidopsis thaliana
actaattt

SEQ ID NO: 253 - DNA, 12 bp, Arabidopsis thaliana
ccaatttaatgg

SEQ ID NO: 254 - DNA, 6 bp, Arabidopsis thaliana
actcat

SEQ ID NO: 255 - DNA, 19 bp, Arabidopsis thaliana
cttaaaccctaggggtaat

SEQ ID NO: 256 - DNA, 10 bp, Arabidopsis thaliana
  misc_feature (3)..(3): n is a or t
ttntactagt

SEQ ID NO: 257 - DNA, 9 bp, Arabidopsis thaliana
ataaaacgt

SEQ ID NO: 258 - DNA, 9 bp, Arabidopsis thaliana
tgtatatat

SEQ ID NO: 259 - DNA, 9 bp, Arabidopsis thaliana
ctcctaatt

SEQ ID NO: 260 - DNA, 10 bp, Arabidopsis thaliana
ttgcatgact

SEQ ID NO: 261 - DNA, 6 bp, Arabidopsis thaliana
agccac

SEQ ID NO: 262 - DNA, 5 bp, Arabidopsis thaliana
gggcc

SEQ ID NO: 263 - DNA, 9 bp, Arabidopsis thaliana
ctcaagtga

SEQ ID NO: 264 - DNA, 9 bp, Arabidopsis thaliana
gtatgatgg

SEQ ID NO: 265 - DNA, 7 bp, Arabidopsis thaliana
gagtgag

SEQ ID NO: 266 - DNA, 8 bp, Arabidopsis thaliana
cacgtggc

SEQ ID NO: 267 - DNA, 34 bp, artificial sequence
  synthetic construct
gtttaattgagttgtcatatgttaataacggtat

SEQ ID NO: 268 - DNA, 34 bp, artificial sequence
  synthetic construct
ataccgttattaacatatgacaactcaattaaac

SEQ ID NO: 269 - DNA, 97 bp, Zea mays
tggaggtgcgcgtcaagatcctcttcacctcgctctgccacaccgacgtctacttctgggaggccaaggtatctaatcagccatcccatttgtgatc

SEQ ID NO: 270 - DNA, 97 bp, artificial sequence; identical to SEQ ID NO: 269
  synthetic construct

SEQ ID NO: 271 - DNA, 131 bp, artificial sequence
  synthetic construct
tggaggtgcgcgtcaagatcctcttcacctcgctctgccacaccgacgataccgttattaacatatgacaactcaattaaactctacttctgggaggccaaggtatctaatcagccatcccatttgtgatc

SEQ ID NO: 272 - DNA, 98 bp, artificial sequence
  synthetic construct
tggaggtgcgcgtcaagatcctcttcacctcgctctgccacaccgacgttctacttctgggaggccaaggtatctaatcagccatcccatttgtgatc

SEQ ID NO: 273 - DNA, 159 bp, artificial sequence
  synthetic construct
  misc_feature (46)..(50): n is a, c, t, or g
tggaggtgcgcgtcaagatcctcttcacctcgctctgccacaccgnnnnngagttgtcatatgttaataacggtatgtttaattgagttgtcatatgttaataacggtattctacttctgggaggccaaggtatctaatcagccatcccatttgtgatc

SEQ ID NO: 274 - DNA, 129 bp, artificial sequence
  synthetic construct
tggaggtgcgcgtcaagatcctcttcacctcgctctgccacaccgacgtttaattgagttgtcatatgttaataacggtatctacttctgggaggccaaggtatctaatcagccatcccatttgtgatc

SEQ ID NO: 275 - DNA, 97 bp, artificial sequence; identical to SEQ ID NO: 269
  synthetic construct

SEQ ID NO: 276 - DNA, 129 bp, artificial sequence
  synthetic construct
tggaggtgcgcgtcaagatcctcttcacctcgctctgccacaccgacgataccgttattaacatatgacaactcaattaaactacttctgggaggccaaggtatctaatcagccatcccatttgtgatc

SEQ ID NO: 277 - DNA, 159 bp, artificial sequence
  synthetic construct
  misc_feature (46)..(50): n is a, c, t, or g
tggaggtgcgcgtcaagatcctcttcacctcgctctgccacaccgnnnnntgagttgtcatatgttaataacggtatgttaattgagttgtcatatgttaataacggtattctacttctgggaggccaaggtatctaatcagccatcccatttgtgatc

SEQ ID NO: 278 - DNA, 92 bp, artificial sequence
  synthetic construct
tggaggtgcgcgtcaagatcctcttcacctcgctctgccacaccgacgttctgggaggccaaggtatctaatcagccatcccatttgtgatc

SEQ ID NO: 279 - DNA, 159 bp, artificial sequence
  synthetic construct
  misc_feature (46)..(50): n is a, c, t, or g
tggaggtgcgcgtcaagatcctcttcacctcgctctgccacaccgnnnnntattaacatatgacaactcaattaaactaccgttattaacatatgacaactcaattaaactctacttctgggaggccaaggtatctaatcagccatcccatttgtgatc

SEQ ID NO: 280 - DNA, 159 bp, artificial sequence
  synthetic construct
  misc_feature (46)..(50): n is a, c, t, or g
tggaggtgcgcgtcaagatcctcttcacctcgctctgccacaccgnnnnngtttaattgagttgtcatatgttaataacggtattaccgttattaacatatgacaactcaattaaacctgggaggccaaggtatctaatcagccatcccatttgtgatc

SEQ ID NO: 281 - DNA, 159 bp, artificial sequence
  synthetic construct
  misc_feature (46)..(50): n is a, c, t, or g
tggaggtgcgcgtcaagatcctcttcacctcgctctgccacaccgnnnnnggtttaattgagttgtcatatgttaataacggtagtttaattgagttgtcatatgttaataacggtattgggaggccaaggtatctaatcagccatcccatttgtgatc

SEQ ID NO: 282 - DNA, 91 bp, artificial sequence
  synthetic construct
tggaggtgcgcgtcaagatcctcttcacctcgctctgccacaccgacttctgggaggccaaggtatctaatcagccatcccatttgtgatc

SEQ ID NO: 283 - DNA, 94 bp, artificial sequence
  synthetic construct
tggaggtgcgcgtcaagatcctcttcacctcgctctgccacaccgacgacttctgggaggccaaggtatctaatcagccatcccatttgtgatc

SEQ ID NO: 284 - DNA, 98 bp, artificial sequence
  synthetic construct
tggaggtgcgcgtcaagatcctcttcacctcgctctgccacaccgacgctctacttctgggaggccaaggtatctaatcagccatcccatttgtgatc

SEQ ID NO: 285 - DNA, 159 bp, artificial sequence
  synthetic construct
  misc_feature (46)..(50): n is a, c, t, or g
tggaggtgcgcgtcaagatcctcttcacctcgctctgccacaccgnnnnngagttgtcatatgttaataacggtatataccgttattaacatatgacaactcaattaaactctacttctgggaggccaaggtatctaatcagccatcccatttgtgatc

SEQ ID NO: 286 - DNA, 159 bp, artificial sequence
  synthetic construct
  misc_feature (46)..(50): n is a, c, t, or g
tggaggtgcgcgtcaagatcctcttcacctcgctctgccacaccgnnnnnttgagttgtcatatgttaataacggtataccgttattaacatatgacaactcaattaaactctacttctgggaggccaaggtatctaatcagccatcccatttgtgatc

SEQ ID NO: 287 - DNA, 159 bp, artificial sequence
  synthetic construct
  misc_feature (46)..(50): n is a, c, t, or g
tggaggtgcgcgtcaagatcctcttcacctcgctctgccacaccgnnnnnttaattgagttgtcatatgttaataacggtataccgttattaacatatgacaactcaattaaaccttctgggaggccaaggtatctaatcagccatcccatttgtgatc

SEQ ID NO: 288 - DNA, 96 bp, artificial sequence
  synthetic construct
tggaggtgcgcgtcaagatcctcttcacctcgctctgccacaccgactctacttctgggaggccaaggtatctaatcagccatcccatttgtgatc

SEQ ID NO: 289 - DNA, 127 bp, artificial sequence
  synthetic construct
tggaggtgcgcgtcaagatcctcttcacctcgctctgccacaccgacggtttaattgagttgtcatatgttaataacggtatcttctgggaggccaaggtatctaatcagccatcccatttgtgatc

SEQ ID NO: 290 - DNA, 126 bp, artificial sequence
  synthetic construct
tggaggtgcgcgtcaagatcctcttcacctcgctctgccacaccgacgataccgttattaacatatgacaactcaattaaacttctgggaggccaaggtatctaattagccatcccatttgtgatc

SEQ ID NO: 291 - DNA, 125 bp, artificial sequence
  synthetic construct
tggaggtgcgcgtcaagatcctcttcacctcgctctgccacaccgacggtttaattgagttgtcatatgttaataacggtattctgggaggccaaggtatctaatcagccatcccatttgtgatc

SEQ ID NO: 292 - DNA, 128 bp, artificial sequence
  synthetic construct
tggaggtgcgcgtcaagatcctcttcacctcgctctgccacaccgataccgttattaacatatgacaactcaattaaactctacttctgggaggccaaggtatctaatcagccatcccatttgtgatc

SEQ ID NO: 293 - DNA, 110 bp, artificial sequence
  synthetic construct
tggaggtgcgcgtcaagatcctcttcacctaccgttattaacatatgacaactcaattaaacctacttctgggaggccaaggtatctaatcagccatcccatttgtgatc

SEQ ID NO: 294 - DNA, 88 bp, artificial sequence
  synthetic construct
tggaggtgcgcgtcaagatcctcttcacctcgctctgccacaccgacggggaggccaaggtatctaatcagccatcccatttgtgatc

SEQ ID NO: 295 - DNA, 104 bp, artificial sequence
  synthetic construct
tggaggtgcgcgtcaagatcctcttcacctcgctctgccacaccgacggtttaattctacttctgggaggccaaggtatctaatcagccatcccatttgtgatc

SEQ ID NO: 296 - DNA, 159 bp, artificial sequence
  synthetic construct
  misc_feature (46)..(50): n is a, c, t, or g
tggaggtgcgcgtcaagatcctcttcacctcgctctgccacaccgnnnnnccgttattaacatatgacaactcaattataccgttattaacatatgacaactcaattaaacctacttctgggaggccaaggtatctaatcagccatcccatttgtgatc

SEQ ID NO: 297 - DNA, 130 bp, artificial sequence
  synthetic construct
tggaggtgcgcgtcaagatcctcttcacctcgctctgccacaccgacggtttaattgagttgtcatatgttaataacggtatctacttctgggaggccaaggtatctaatcagccatcccatttgtgatc

SEQ ID NO: 298 - DNA, 94 bp, artificial sequence
  synthetic construct
tggaggtgcgcgtcaagatcctcttcacctcgctctgccacaccgactacttctgggaggccaaggtatctaatcagccatcccatttgtgatc

SEQ ID NO: 299 - DNA, 131 bp, artificial sequence; identical to SEQ ID NO: 271
  synthetic construct

SEQ ID NO: 300 - DNA, 93 bp, artificial sequence
  synthetic construct
tggaggtgcgcgtcaagatcctcttcacctcgctctgccacaccgacacttctgggaggccaaggtatctaatcagccatcccatttgtgatc

SEQ ID NO: 301 - DNA, 131 bp, artificial sequence
  synthetic construct
tggaggtgcgcgtcaagatcctcttcacctcgctctgccacaccgacggtttaattgagttgtcatatgttaataacggtattctacttctgggaggccaaggtatctaatcagccatcccatttgtgatc

SEQ ID NO: 302 - DNA, 159 bp, artificial sequence
  synthetic construct
  misc_feature (46)..(50): n is a, c, t, or g
tggaggtgcgcgtcaagatcctcttcacctcgctctgccacaccgnnnnnagttgtcatatgttaataacggtatataccgttattaacatatgacaactcaattaaacatctacttctgggaggccaaggtatctaatcagccatcccatttgtgatc

SEQ ID NO: 303 - DNA, 159 bp, artificial sequence
  synthetic construct
  misc_feature (46)..(50): n is a, c, t, or g
tggaggtgcgcgtcaagatcctcttcacctcgctctgccacaccgnnnnntataatcctcatgtcagccatggagtatttggaaatacagaaattcatggttggtggacatctacttctgggaggccaaggtatctaatcagccatcccatttgtgatc

SEQ ID NO: 304 - DNA, 96 bp, artificial sequence
  synthetic construct
tggaggtgcgcgtcaagatcctcttcacctcgctctgccacaccgacgctacttctgggaggccaaggtatctaatcagccatcccatttgtgatc

SEQ ID NO: 305 - DNA, 497 bp, Zea mays
gggttgttgtgggttgaacccgtcccaaccatcatcaactcgctagccaaacacacgcttaggggccaaagcagtgctataatatgagtggtggcgctattatatatagcgtcagagaacttagatctgatattctgatgaagaaaaaatgactttactgactacgaaagaagaagaaaggagctatagagagagagaaaaagaggggtcgtgtagtgcttaaactgtacatgaacagcagtagtgttacagaagctaaactcaaccagagctccaccaaagacaaagagggtctacttccatcaccgtcttgctcggtcacttggagctctgtccataaattaaacccatcttggatcccaaggttcgtggcatatctgtaggcatctaccccgtcttcgtcgtccgctcctcactagctaccaagaggtcgccattattgccaacatagagtgtacgtggatgtctatatatatgcctacttgcacccatatggc

SEQ ID NO: 306 - DNA, 34 bp, artificial sequence
  synthetic construct
ccgacaaaaggccgacaaaaggccgacaaaaggt

SEQ ID NO: 307 - DNA, 34 bp, artificial sequence
  synthetic construct
accttttgtcggccttttgtcggccttttgtcgg

SEQ ID NO: 308 - DNA, 11 bp, artificial sequence
  synthetic construct
ccttttgtcgg

SEQ ID NO: 309 - DNA, 68 bp, artificial sequence
  synthetic construct
gccgacaaaaggccgacaaaaggccgacaaaaggccgacaaaaggccgacaaaaggccgacaaaaggt

SEQ ID NO: 310 - DNA, 68 bp, artificial sequence
  synthetic construct
accttttgtcggccttttgtcggccttttgtcggccttttgtcggccttttgtcggccttttgtcggc

SEQ ID NO: 311 - DNA, 100 bp, artificial sequence
  synthetic construct
ccgacaaaaggccgacaaaaggccgacaaaaggccgacaaaaggccgacaaaaggccgacaaaaggccgacaaaaggccgacaaaaggccgacaaaaggt

SEQ ID NO: 312 - DNA, 100 bp, artificial sequence
  synthetic construct
accttttgtcggccttttgtcggccttttgtcggccttttgtcggccttttgtcggccttttgtcggccttttgtcggccttttgtcggccttttgtcgg

SEQ ID NO: 313 - DNA, 21 bp, artificial sequence
  synthetic construct
ctccaccaaagacaaagaggg

SEQ ID NO: 314 - DNA, 21 bp, artificial sequence
  synthetic construct
gccatatgggtgcaagtaggc

SEQ ID NO: 315 - DNA, 226 bp, artificial sequence
  synthetic construct
ctccaccaaagacaaagagggtctacttccatcaccgtcttgctcggtcacttggagctctgtccataaattaaacccatcttggatcccaaggttcgtggcatatctgtaggcatctaccccgtcttcgtcgtccgctcctcactagctaccaagaggtcgccattattgccaacatagagtgtacgtggatgtctatatatatgcctacttgcacccatatggc

SEQ ID NO: 316 - DNA, 34 bp, artificial sequence
  synthetic construct
ataacttcgtatagcatacattatacgaagttat

SEQ ID NO: 317 - DNA, 34 bp, artificial sequence
  synthetic construct
ataacttcgtataatgtatgctatacgaagttat

SEQ ID NO: 318 - DNA, 34 bp, artificial sequence
  synthetic construct
  misc_feature (14)..(16): n is a, c, t, or g
  misc_feature (19)..(21): n is a, c, t, or g
ataacttcgtatannntannntatacgaagttat

SEQ ID NO: 319 - DNA, 34 bp, artificial sequence
  synthetic construct
ataacttcgtataatgtatactatacgaagttat

SEQ ID NO: 320 - DNA, 34 bp, artificial sequence
  synthetic construct
ataacttcgtataatgtgtactatacgaagttat

SEQ ID NO: 321 - DNA, 34 bp, artificial sequence
  synthetic construct
ataacttcgtataaagtatcctatacgaagttat

SEQ ID NO: 322 - DNA, 34 bp, artificial sequence
  synthetic construct
ataacttcgtataagaaaccatatacgaagttat

SEQ ID NO: 323 - DNA, 34 bp, artificial sequence
  synthetic construct
ataacttcgtatataataccatatacgaagttat

SEQ ID NO: 324 - DNA, 34 bp, artificial sequence
  synthetic construct
ataacttcgtataagatagaatatacgaagttat

SEQ ID NO: 325 - DNA, 34 bp, artificial sequence; identical to SEQ ID NO: 324
  synthetic construct

SEQ ID NO: 326 - DNA, 34 bp, artificial sequence
  synthetic construct
  misc_feature (14)..(16): n is a, c, t, or g
  misc_feature (19)..(21): n is a, c, t, or g
taccgttcgtatannntannntatacgaagttat

SEQ ID NO: 327 - DNA, 34 bp, artificial sequence
  synthetic construct
  misc_feature (14)..(16): n is a, c, t, or g
  misc_feature (19)..(21): n is a, c, t, or g
ataacttcgtatannntannntatacgaacggta

SEQ ID NO: 328 - DNA, 11 bp, artificial sequence
  synthetic construct
cctcgtgtctc

SEQ ID NO: 329 - DNA, 11 bp, artificial sequence
  synthetic construct
ccttttgtctc

SEQ ID NO: 330 - DNA, 11 bp, artificial sequence
  synthetic construct
  misc_feature (10)..(10): n is a, c, or g
ccttttgtcnc

SEQ ID NO: 331 - DNA, 6 bp, artificial sequence
  synthetic construct
tgtctc

SEQ ID NO: 332 - protein, 5 aa, artificial sequence
  synthetic construct
  MISC_FEATURE (2)..(2): X is any amino acid
  MISC_FEATURE (4)..(4): X is any amino acid
LXLXL

SEQ ID NO: 333 - protein, 6 aa, artificial sequence
  synthetic construct
  MISC_FEATURE (4)..(5): X is any amino acid
DLNXXP

SEQ ID NO: 334 - RNA, 36 nt, artificial sequence
  synthetic construct
cuccaagugaccgagcaagaguuuuagagcuaugcu

SEQ ID NO: 335 - DNA, 392 bp, Zea mays
acaacaaaaaaaggtaacctcgctactaacataacaaaatacttgttgcttattaattatatgttttttaatctttgatcaggggacaacagtggttgataacctgttgaacagtgaggatgtccactacatgctcggggccttgaggactcttggtctctctgtcgaagcggacaaagctgccaaaagagctgtagttgttggctgtggtggaaagttcccagttgaggattctaaagaggaagtgcagctcttcttggggaatgctggaactgcaatgcggccattgacagcagctgttactgctgctggtggaaatgcaacgtatgtttcctctctttctctctacaatacttgctggagttagtatgaaacccatgggtatgtctagt

SEQ ID NO: 336 - RNA, 36 nt, artificial sequence
  Synthetic construct
auuuuguuauguuaguagcgguuuuagagcuaugcu

SEQ ID NO: 337 - RNA, 36 nt, artificial sequence
  Synthetic construct
ggaguuaguaugaaacccauguuuuagagcuaugcu

SEQ ID NO: 338 - DNA, 23 bp, artificial sequence
  Synthetic construct
tactaacataacaaaatacttgt

SEQ ID NO: 339 - DNA, 23 bp, artificial sequence
  Synthetic construct
ggtttcatactaactccagcaag

SEQ ID NO: 340 - DNA, 353 bp, artificial sequence
  Synthetic construct
tactaacataacaaaatacttgttgcttattaattatatgttttttaatctttgatcaggggacaacagtggttgataacctgttgaacagtgaggatgtccactacatgctcggggccttgaggactcttggtctctctgtcgaagcggacaaagctgccaaaagagctgtagttgttggctgtggtggaaagttcccagttgaggattctaaagaggaagtgcagctcttcttggggaatgctggaattgcaatgcgggcattgacagcagctgttactgctgctggtggaaatgcaacgtatgtttcctctctttctctctacaatacttgctggagttagtatgaaacc

SEQ ID NO: 341 - DNA, 16 bp, Agrobacterium tumefasciens
acgtaagcgcttacgt

SEQ ID NO: 342 - DNA, 15 bp, Zea mays
acgtaagcgcttacg

SEQ ID NO: 343 - DNA, 12 bp, Zea mays
gtaagcgcttac

SEQ ID NO: 344 - RNA, 36 nt, artificial sequence
  Synthetic construct
auagagagagagaaaaagagguuuuagagcuaugcu

SEQ ID NO: 345 - DNA, 672 bp, Zea mays
cgataaacgccactaaaaatggttttacgaccgccagtatatatcttctctgtactagtgtgatactatcaggccgcatgcagattcctttcgattgtttatagggtttttttttttataaagactgctggttttcaagccttgaatcttgtagctaggtagccagaccggtcccggccgggtcgaggaagacgcaaaactcagcaagcacagttgtgctagcctgctaggcacggtgtgtagcaagagacagaaacgagcgtataaccatggcgattaactgatagctgtggaattttgagcacatagtcctccaaacatttgcatttgtattgtactattgtttatgtagcgaagtttaaaatgcagtttggtaggcctaacccgcatgcgagggcaccgcacagtgaggctgaggaacggaaccactccagctaagattccgcaccgcagcaaccctgggatcctgctgtcagcgcgggccgcgggaggggagattcactggcagcagggccccacaccccttcccaggcttcccatctcagaaaacagaagccgatctgttttgttctgccgaatcaaaagtgcgatatgatcgtcatctcttcgacagcacccgcccaaccatctcctataaatccgatcgccgccactggccgttcgtcccccatc

SEQ ID NO: 346 - RNA, 36 nt, artificial sequence
  Synthetic construct
ccagugaaucuccccucccgguuuuagagcuaugcu

SEQ ID NO: 347 - RNA, 36 nt, artificial sequence
  Synthetic construct
cguuccucagccucacugugguuuuagagcuaugcu

SEQ ID NO: 348 - RNA, 36 nt, artificial sequence
  Synthetic construct
cagaaacgagcguauaaccaguuuuagagcuaugcu

SEQ ID NO: 349 - DNA, 43 bp, artificial sequence
  Synthetic construct
aagagatgagctcttgagcaatgtaaagggtcaagttgtttct

SEQ ID NO: 350 - DNA, 43 bp, artificial sequence
  Synthetic construct
agaaacaacttgaccctttacattgctcaagagctcatctctt

SEQ ID NO: 351 - RNA, 34 nt, artificial sequence
  synthetic construct
accuuuugucggccuuuugucggccuuuugucgg

SEQ ID NO: 352 - RNA, 21 nt, artificial sequence
  synthetic construct
uggacagagcuccaagugacc

SEQ ID NO: 353 - DNA, 38 bp, artificial sequence
  synthetic construct
tcggtccgacaaaaggccgacaaaaggcggacaaaagg

SEQ ID NO: 354 - DNA, 38 bp, artificial sequence
  synthetic construct
accgaccttttgtcggccttttgtcggccttttgtcgg

SEQ ID NO: 355 - DNA, 346 bp, Oryza sativa
aagcggaggtccggaggaggaagcggcgagagaagctcagctaggcagggcgacgggcagaaacgcgaccacggcaacaaaccccgccgcgcgcgcccaccgtgccggttacatgggagtagaggcgggcggcggctgcggtgggagggcggtagtcaccggattctacgtctggggctgggagttcctcaccgccctcctgctcttctcggccaccacctcctactagctatacacacccatctcaccataacacacatacatagatagatagatagatagatacatacacacaaacataagtagctaggtagagaaagagatcatagcgttaggtgatcgatcg

SEQ ID NO: 356 - DNA, 117 bp, Oryza sativa
atgggagtagaggcgggcggcggctgcggtgggagggcggtagtcaccggattctacgtctggggctgggagttcctcaccgccctcctgctcttctcggccaccacctcctactag

SEQ ID NO: 357 - DNA, 89 bp, Oryza sativa
gaggcctcctcctcgcctcgcctcgccacgccgcgccgcgacgcgacgcgccgtggtcagctggtcgccggtgcgggtgcgggtgcgca

SEQ ID NO: 358 - DNA, 15 bp, artificial sequence
  synthetic construct
aaaaaaaaaaaaaaa

SEQ ID NO: 359 - DNA, 25 bp, Arabidopsis thaliana
cacatacacacaaaaataaaaaaga

SEQ ID NO: 360 - DNA, 325 bp, Oryza sativa
caaacgccaaaacgccacggaaacaaatcaacaatttcctctcctgtcaatgaacttgtgtgcacgacaactcatctgacagtgatccatcgtcctttttctttgactcgatgactttgtgagagatgttttatgccgattttatctactaaagtacttactaatcctgcggttgatccatcgccgcgcggttcacgcgccaaatgacgagtcgaaatgtatgcgtagtttgaccacatgcatagctcactggagaagctattagctatatataccgctgcaatgctcgctagcttagctaagcaactgcaagtgaagcggcgac

SEQ ID NO: 361 - RNA, 36 nt, artificial sequence
  synthetic construct
caaacaaaaaagaaugcaugguuuuagagcuaugcu

SEQ ID NO: 362 - RNA, 36 nt, artificial sequence
  synthetic construct
uguauccguauuuauacgugguuuuagagcuaugcu

SEQ ID NO: 363 - RNA, 36 nt, artificial sequence
  synthetic construct
gacgcgagugggggcccacgguuuuagagcuaugcu

SEQ ID NO: 364 - DNA, 16 bp, artificial sequence
  synthetic construct
gaatatatatatattc

SEQ ID NO: 365 - RNA, 36 nt, artificial sequence
  synthetic construct
gcgcuccuucuccuccauggguuuuagagcuaugcu

SEQ ID NO: 366 - RNA, 36 nt, artificial sequence
  synthetic construct
ccucggcguggcgcucucggguuuuagagcuaugcu

SEQ ID NO: 367 - DNA, 550 bp, Zea mays
gtgaacaaccttatgaaatttgggcgcaaagaactcgccctcaagggttgatcttatgccatcgtcatgataaacagtggagcacggacgatcctttacgttgtttttaacaaactttgtcagaaaactagcatcattaacttcttaatgacgatttcacaacaaaaaaaggtaacctcgctactaacataacaaaatacttgttgcttattaattatatgttttttaatctttgatcaggggacaacagtggttgataacctgttgaacagtgaggatgtccactacatgctcggggccttgaggactcttggtctctctgtcgaagcggacaaagctgccaaaagagctgtagttgttggctgtggtggaaagttcccagttgaggattctaaagaggaagtgcagctcttcttggggaatgctggaactgcaatgcggccattgacagcagctgttactgctgctggtggaaatgcaacgtatgtttcctctctttctctctacaatacttgctggagttagtatgaaacccatgggtatgtctagt

SEQ ID NO: 368 - RNA, 41 nt, artificial sequence
  synthetic construct
uaauuucuacucuuguagauggcgcaaagaacucgcccuca

SEQ ID NO: 369 - RNA, 41 nt, artificial sequence
  synthetic construct
uaauuucuacucuuguagauauacuaacuccagcaaguauu

SEQ ID NO: 370 - DNA, 45 bp, artificial sequence
  synthetic construct
tcaagggtataacttcgtatagcatacattatacgaagttattca

SEQ ID NO: 371 - DNA, 45 bp, artificial sequence
  synthetic construct
cttgatgaataacttcgtataatgtatgctatacgaagttatacc

SEQ ID NO: 372 - DNA, 45 bp, artificial sequence
  synthetic construct
acaatggtataacttcgtataaagtatcctatacgaagttattca

SEQ ID NO: 373 - DNA, 45 bp, artificial sequence
  synthetic construct
attgttgaataacttcgtataggatactttatacgaagttatacc

SEQ ID NO: 374 - DNA, 24 bp, artificial sequence
  synthetic construct
gtgaacaaccttatgaaatttggg

SEQ ID NO: 375 - DNA, 24 bp, artificial sequence
  synthetic construct
actagacatacccatgggtttcat

SEQ ID NO: 376 - DNA, 618 bp, artificial sequence
  synthetic construct
gtgaacaaccttatgaaatttgggcgcataacttcgtatagcatacattatacgaagttataaagaactcgccctcaagggttgatcttatgccatcgtcatgataaacagtggagcacggacgatcctttacgttgtttttaacaaactttgtcagaaaactagcatcattaacttcttaatgacgatttcacaacaaaaaaaggtaacctcgctactaacataacaaaatacttgttgcttattaattatatgttttttaatctttgatcaggggacaacagtggttgataacctgttgaacagtgaggatgtccactacatgctcggggccttgaggactcttggtctctctgtcgaagcggacaaagctgccaaaagagctgtagttgttggctgtggtggaaagttcccagttgaggattctaaagaggaagtgcagctcttcttggggaatgctggaattgcaatgcgggcattgacagcagctgttactgctgctggtggaaatgcaacgtatgtttcctctctttctctctacaatacttgcataacttcgtataaagtatcctatacgaagttattggagttagtatgaaacccatgggtatgtctagt

SEQ ID NO: 377 - DNA, 92 bp, artificial sequence
  synthetic construct
attaaaaaaataaataagatattattaaaaaaataaataagatattattaaaaaaataaataagatattattaaaaaaataaataagatatt

SEQ ID NO: 378 - DNA, 36 bp, artificial sequence
  synthetic construct
ttatttattttatttattttatttattttatttatt

SEQ ID NO: 379 - DNA, 111 bp, artificial sequence
  synthetic construct
atggaagaaaccaaacgaaactccgatcttctccgttctcgtgttttcctctctggcttttattgctgggattgggaatttctcaccgctctcttgctttttagttgctga

SEQ ID NO: 380 - DNA, 92 bp, artificial sequence
  synthetic construct
agatctaggagactgacatagattggaggagacattttgtataataagatctaggagactgacatagattggaggagacattttgtataata

SEQ ID NO: 381 - DNA, 201 bp, Zea mays
tccatcctcgctctacctgcctgctgccagtttcaactctccaaggtcaacgccagccctcgcgcgcttggtgtactctagtttagtacaccaatccgcatgcattcttttttgtttgtttgtttgtttgtttgttttgattgacaaatatatgcggcagagttaagaacgaatcgactccgtcgtctcggctagtcgacc

SEQ ID NO: 382 - DNA, 201 bp, Zea mays
aggggcttgacgccttaccagtacgcggtgctccctcttctcgcacctaccgcacggaggatatgacctaatacaattaatttacgcggaactcgaaatgtatccgtatttatacgtgtggaacgtacaagtatacgtattttgttggttttttttttactttttacccggctggacgccaaccaactggtttcccgtcct

SEQ ID NO: 383 - DNA, 201 bp, Zea mays
cgggcccacgggaggtcgcgtcgattcgcagcagcgcgccgcccccctccccaccaccacgtcaagcggcgtgggcttccgcccctccctgcccgccgcgtgggcccccactcgcgtcctgtaaccgggatagcgtgagcacgtcgctatcgtccgtaacggcgaccgcgaccataagagaggaggcaaagccagcccccg

SEQ ID NO: 384 - DNA, 201 bp, Zea mays
agcacggacgatcctttacgttgtttttaacaaactttgtcagaaaactagcatcattaacttcttaatgacgatttcacaacaaaaaaaggtaacctcgctactaacataacaaaatacttgttgcttattaattatatgttttttaatctttgatcaggggacaacagtggttgataacctgttgaacagtgaggatgt

SEQ ID NO: 385 - DNA, 201 bp, Zea mays
attccgttggacccctaccgctcctcagtcagtcctcgcccctcccagcaccggccaacaatccctcacgttattccctgtagctactatgctgccctcttggatccctttttcacttgtctgagatttagccaccgcccggtaggaagaagaaggggaagcaccatattttctgttcctggcctgacgcagcgccggtga

SEQ ID NO: 386 - DNA, 280 bp, Zea mays
caagcaagcaggttcagaagaagaacacggagaaacttgaagtaatgctaggtaggttagcacgaagtagtttctgcgcgttctctgtgatcttttggcatttgtttttggctgctggtggcttaccatcgtcagatggtgacggaggaaggagggaacatggatctggatggtgtgagccacagattacattacagtagtagagtaaactatgagagttcttgtggactgaaggtgtgtagtggtggatagggtagcttctccggggttcttttgtgtg

SEQ ID NO: 387 - DNA, 307 bp, Zea mays
gacttctgagcgaggagtggacgagtggtgtgccgtcgtccggttcccgttggtttggcgatgaggcgcgctcgcggtcgccgcgggctgctgcttctcctcggcgtggcgctctcggcggctgcgctgctccgtggctgcgcggggcagcaaggggaggacggctcggacgcccctgcggcggcggcggcggagacggcccccatggaggagaaggagcgcagggcgctgtacgccgccatcgagagcttcgtcggcaaggggtggaacggctccgggctctacccagacccctgcggctggtctc

SEQ ID NO: 388 - DNA, 546 bp, Glycine max
aatttaatctaatggtagataatgtgttcaaaggaacgcttgataacatttctcgtgataaatacgtatttatgagactatttagttatgatcatccatgtcaattaatttccaacccaaagtaatgatcatgtgccaagttgccacccataatttatctcaaaattaatgaaacccaaataaaggcgttgaataataccaccatacaaaagtgtgttatttagcagcatatgtaactaggcatatatctatctgtatatatgagagttgattatgtgtcacatatgaacctttgagacataccatgggttctttttggcatacgcggcgaaatggattacgtcaaatacagcttttgtttaatgcttaaagctttggcagccgatggaaatttcattggcattgtcaacgccttcccctactataagtacaatcacactccttgtctctccctcacaacactaggccttcaatttggttttgtttcatcagttttccagatacagcacattgattgttaaggcgaaatggctgatattgagggtt

SEQ ID NO: 389 - DNA, 474 bp, Glycine max
ttgtttactcctagttattatcttaaaaaaattgaatcatataattatatattaagttttgaatatgtgtttccatcttatagtttatgagattaccatgtgtttaacagattgggatctacaaactttaaaagtaagcagtagatacataatagttttataggcctggttggttagctgaaatttacagctactacgcggataatgaaccccaatgatgaaaacatgcagacgcatgttgcagcatggaagtattttatttaataagaataataataaggtaagtggtagtaattaaattccatattcagtatcatgggaaatgagattctttgcctttgggatacaccattaggcttttagccgttccactgtgtatatgcggcgaaatgcattactccatggcccttgggaatccacttgcctcctatcagactcttacgtagtcaacgccttcgcctactataaaaacac

SEQ ID NO: 390 - DNA, 514 bp, Glycine max
aaagaagctatgaggtgcaagaaccgatcacatggagaaggcaatgaaagacaaggaggagcaatggaagagagaaaatgagaagatggaagggatgtgaaaatgtttgaaaaaaacgaggtgatcagttttaaaatacgaatttagtattttctttttaagaaaattctttcggaaagtcgtgttttaaaacatgacttttatttatttgaagtcgtgttctaaaacatgactttatttcatatcctttaatattttatatccttaatatttttaaaatttatccatttgtaatattttttaaaaattgacccatatatgtaaaatacccgtcaagatctctttattattttgaaagcgaaagcatatcacttcaaacacaatggaatcgaggctattgactaagtataaatagagaagacttcatatcggggttcataattcataacaaagcaaacgagtatataagaaagcataagccaaattttgagtaaactagtgtgcacactatccc

SEQ ID NO: 391 - DNA, 476 bp, Glycine max
cacgtggccccacacacattttttttccctcaacagttaaactctcttcctccatctttcttggtaggtggcacttctcggagcatagtaaaactaaccccacatttttctttttcattttcattttcattatattataaacctatatatatacccaattggttattggtgtctggtgtcccttcaacctttaaaacaaacaaatccattttctttttcttttttttttcattttattttttccattattttatcaacacaattaattccatgtgtatcctttggtcctttctgtcccacagcacatatatatagtctcgctttacatactcattccatggccagtacacacaccacacctcattatatctttctttcaattcctatcctcttccttgtagtgtacccattttgaatgtgttctctctctctctctctttctttaggtccctggtgaatatctagaaccactctct

SEQ ID NO: 392 - DNA, 367 bp, Solanum lycopersicum
ataagtatgtgcgtaaaagtctaagtggagtcacgtgtgtatgatatgaggtcacattagaattgttactagaaaagatatgaaggaatcttttcatttttattttattttctttttacatagagtaaacaaaaaaaattgactggaattgaagtggtaagccaaaaaatgtgagaatacatgaaaaagtgtgagagaagtcacgtgtgtatggtatgaggtcacatgaatattattgccgaaaatgatatgagagaatcttttcatttttattttattttcttttttaaacagagtaaaaaaaattaagtgtgtatatatatatatgagaaatggggaaacaaattatcaaacataattaccattg

SEQ ID NO: 393 - DNA, 464 bp, Solanum lycopersicum
attacataaagatacaactataatctgacctagcttataaaggatgtgaaatctaaaatgatgatatataccttgataaaaaaattttgctacatcgccttttgcaattatttcattttgaaagtattcatatttgtttataaaaaattttcaaatattttaataaataaataaataaaattatattttatttatgattttcaaatatgtcaatgatataaatgattagctataaatctcataaatttctatatagacttattaaaataaagtataaaaagattttattttatttttgaaatacgaaaaatatgcgtgcttgagcctctaactacctcctatataaatgatgaaagaaaatgttaggtgtgagaagtatatatccttatcccaactttggaatttcaaatcgtttgattattaagttatttgtttgttgtggaaattaaatatgattcaaaggg

SEQ ID NO: 394 - DNA, 376 bp, Solanum lycopersicum
caaccctttaatgtcacatttcttgtttggtcttgtgaatttaagtctgcaactgtcacaaaaatcatactactatattaatgtgttgcatttatcgccatttttttaatactgttttcttgcttagcaaatattactatacttgggcggattctccaaatcccatgtgcaattaaaattacaaactttgttatttactccattttcttggatctctctatgacttgtctttttctaattttctatatatttaccaacatgttatgttgaattaaaagaagaaaaaaaacaagaagatttagttttttttatttttgtgtgtgtgtgtttgagaaaatgagtagtattacttattctaatttgatattgaagagga

SEQ ID NO: 395 - DNA, 434 bp, Glycine max
caaaaattaattcttttagtaatgatagaatctaatatcttaattcaatgattaattataacttaagtcttcctttaaaataaatctcatctcatctccttcttccttttttgagagagaatctcatctcattcttcggtgatcaaatctagtgccagtaccgtacttggtacgctaccttcacttgcctatgtgcttatcagctatcacctacctttcataatttaatataaaaaataaataaacaatgtcgctgcaaagcatgttcatgttcattaattcatttttattattaaaaaaaaaacacccctttattaggcggcggaaaaactcacggtatctttccaccactttctttatctttagagatcttcttttatatatatatatatatatagatagatagatagatagatacagagatgaaaaatact

SEQ ID NO: 396 - DNA, 269 bp, Glycine max
atcggatttcattgggatccatataattgcgttttcaatttctgtgtccttaaacaagctatgccagagaattaatttaattttaagtgttagctttattattttactttcaaatcattgaggaaaacaatggcctatatattattcctatatgtaacatacaataatgttattgcaatagcgtgtacttcaacctaattatttaataccaagtttctatattaatgttgtatcttatgaaatccttctattttccattctataaatta

SEQ ID NO: 397 - RNA, 36 nt, artificial sequence; identical to SEQ ID NO: 361
  synthetic construct

SEQ ID NO: 398 - RNA, 36 nt, artificial sequence; identical to SEQ ID NO: 362
  synthetic construct

SEQ ID NO: 399 - RNA, 36 nt, artificial sequence; identical to SEQ ID NO: 363
  synthetic construct

SEQ ID NO: 400 - RNA, 36 nt, artificial sequence; identical to SEQ ID NO: 336
  synthetic construct

SEQ ID NO: 401 - RNA, 36 nt, artificial sequence
  synthetic construct
aagugaaaaagggauccaagguuuuagagcuaugcu

SEQ ID NO: 402 - RNA, 36 nt, artificial sequence
  synthetic construct
gcagguucagaagaagaacaguuuuagagcuaugcu

SEQ ID NO: 403 - RNA, 35 nt, artificial sequence
  synthetic construct
ccaugucagauggugacggguuuuagagcuaugcu

SEQ ID NO: 404 - RNA, 36 nt, artificial sequence
  synthetic construct
uggauaggguagcuucuccgguuuuagagcuaugcu

SEQ ID NO: 405 - RNA, 34 nt, artificial sequence
  synthetic construct
gcgcuccuucuccuccauguuuuagagcuaugcu

SEQ ID NO: 406 - RNA, 36 nt, artificial sequence; identical to SEQ ID NO: 366
  synthetic construct

SEQ ID NO: 407 - RNA, 36 nt, artificial sequence
  synthetic construct
aguguugugagggagagacaguuuuagagcuaugcu

SEQ ID NO: 408 - RNA, 36 nt, artificial sequence
  synthetic construct
gaaccuuugagacauaccauguuuuagagcuaugcu

SEQ ID NO: 409 - RNA, 36 nt, artificial sequence
  synthetic construct
ggguuggaaauuaauugacaguuuuagagcuaugcu

SEQ ID NO: 410 - RNA, 36 nt, artificial sequence
  synthetic construct
auuucgccgcauauacacagguuuuagagcuaugcu

SEQ ID NO: 411 - RNA, 36 nt, artificial sequence
  synthetic construct
ugaaauuuacagcuacuacgguuuuagagcuaugcu

SEQ ID NO: 412 - RNA, 36 nt, artificial sequence
  synthetic construct
aucccaaucuguuaaacacaguuuuagagcuaugcu

SEQ ID NO: 413 - RNA, 36 nt, artificial sequence
  synthetic construct
gugauagcugauaagcacauguuuuagagcuaugcu

SEQ ID NO: 414 - RNA, 36 nt, artificial sequence
  synthetic construct
uuaggcggcggaaaaacucaguuuuagagcuaugcu

SEQ ID NO: 415 - RNA, 36 nt, artificial sequence
  synthetic construct
ucucucucaaaaaaggaagaguuuuagagcuaugcu

SEQ ID NO: 416 - RNA, 36 nt, artificial sequence
  synthetic construct
gaaaauguuugaaaaaaacgguuuuagagcuaugcu

SEQ ID NO: 417 - RNA, 36 nt, artificial sequence
  synthetic construct
auagagaagacuucauaucgguuuuagagcuaugcu

SEQ ID NO: 418 - RNA, 36 nt, artificial sequence
  synthetic construct
aauaauaaagagaucuugacguuuuagagcuaugcu

SEQ ID NO: 419 - RNA, 36 nt, artificial sequence
  synthetic construct
auuuuacuuucaaaucauugguuuuagagcuaugcu

SEQ ID NO: 420 - RNA, 36 nt, artificial sequence
  synthetic construct
cauuauuguauguuacauauguuuuagagcuaugcu

SEQ ID NO: 421 - RNA, 36 nt, artificial sequence
  synthetic construct
aaaugaaaaagaaaaaugugguuuuagagcuaugcu

SEQ ID NO: 422 - RNA, 36 nt, artificial sequence
  synthetic construct
aaaggaccaaaggauacacaguuuuagagcuaugcu

SEQ ID NO: 423 - RNA, 36 nt, artificial sequence
  synthetic construct
aagaaagauauaaugaggugguuuuagagcuaugcu

SEQ ID NO: 424 - RNA, 36 nt, artificial sequence
  synthetic construct
agucacguguguaugauaugguuuuagagcuaugcu

SEQ ID NO: 425 - RNA, 36 nt, artificial sequence
  synthetic construct
agucacguguguaugguaugguuuuagagcuaugcu

SEQ ID NO: 426 - RNA, 36 nt, artificial sequence
  synthetic construct
auauauauauaugagaaaugguuuuagagcuaugcu

SEQ ID NO: 427 - RNA, 36 nt, artificial sequence
  synthetic construct
uuuauauaggagguaguuagguuuuagagcuaugcu

SEQ ID NO: 428 - RNA, 36 nt, artificial sequence
  synthetic construct
caaaaugaaauaauugcaaaguuuuagagcuaugcu

SEQ ID NO: 429 - RNA, 36 nt, artificial sequence
  synthetic construct
aaaugaugaaagaaaauguuguuuuagagcuaugcu

SEQ ID NO: 430 - RNA, 36 nt, artificial sequence
  synthetic construct
uuuguaauuuuaauugcacaguuuuagagcuaugcu

SEQ ID NO: 431 - RNA, 36 nt, artificial sequence
  synthetic construct
uuuaauucaacauaacauguguuuuagagcuaugcu

SEQ ID NO: 432 - RNA, 36 nt, artificial sequence
  synthetic construct
agaaaacaguauuaaaaaaaguuuuagagcuaugcu

SEQ ID NO: 433 - DNA, 4382 bp, Zea mays
cccacaacaaaaatctacacagaacagacatagtggagcctaatcttacatctgaccataaaatggtgtaaagtagcagtgccctcaaagacatttccaaatatatctatatagatgatgtagccactaaggtagggactatgaatactttatggtagtacaatttgggagctattagggacagggccatacaacatgcatgataacttattgagtttgggtaaaatgtgccaatacttgtttcattggtaagaacttgcatttatgataattttatgatttagatggttttaaaataagaatgttcgctttagactaaagtcggctattcggacagatgtagctgcaatctataaagacaaaacacggtagaagtattagaagccggtacatattaaaaccaagcgaacaagcaattataaataaaataaatgcgaatacattttatttaatatttatatttaaatcaaatatgaatatgcatatctgtaacactaatggataccgggtgtgaaacatctgcatccataattgcatatctaccaccgtccaccgagcctgtatgactgtatcagtcacggagctggatggcttcgaaaagcccggcagccgctgtccagtccgacgcagctccacgattgcgttcagtcccttcccgggtcaacccgcgccacatcatcgcccactcaccgggccacggatcgtgtggccgcccggacacggcgggcgggcccccaggcccacgaggcggatcccgagccccgtgccgactcggacgcgcctccctcgctttcatcgcgagatacgcgcggacggccgcgcgccgctggtctggtcgtcatgacagtcgccgccgcctcgtcccacccgacctgaaccccgcaccgtgacagccacggcccaccggacgcgggaccctcatgtcggcgggcacgcacgtgcccccgcatcggcgtcgttgcctcgccaaggccgacgcggatccgagtcatcccgcgtcaccatccatttgacgaggcggtttatcccccagcaccccaaccaacctttccacgtaccaccgggtttctgtccgcgccccgcccttcaaaagcaggtccgcacgccggccggcgagacgagacgacaccaccacgccgggacgggaggcacaggtgcggtctgcgtcgagagttggtccactggcaggccggaatgaagaagtgcgcgtcggagctggagctggaggcgttcatccgggagagcggcgaggacgcccgcgccgccgccggaggtagcagtccggggtgcggtggatcaagcgatcccggagggagcggcgtcttctcacccggcttcggtttcgccgactcggtgagcactgccaaccacgagcaatgtgattgcagcaacagcggcaactctcgcaactgaaaatgcatctgtgcttatacaaagaagataggtagagttcgctacacttaattgtgatttcattaacgaaggatcttctcgcgcccgagcaggacaccatggatggaggcagttggtggtacgggaacgtccgcacgccgaacccagtcatgtcgcaggcggcgtccatatccggtaagcgccaaacatgatactgccctgctcctgcaatctatacaaactggaatttaactgtgtcgtcaaatgctgtgacctctgtacaaagggtaaagtaattgtgatcaactgttggtcagatattatgtgacaccacaaccatcaactatttatgacagtttgcacatgaatcctattgcgtttttaacagatcagtgttttcatttgtcgaaacttctagggaaattcctgcctgctaaacaggcctatttgaatgtatgttaacagcttgccgaaccgatttagagtactactatcacatccaaactatgcggggtttttaaaaaaaaaacgaaaacacccaaattagactcatgtcaagtattgctcacctgccgtattgcactggtcacagctagccccgggctaaccacctcagccaatcatgctcttgaaagcgagtcagactccgacagcgaatcactgtatgaggtagagggagttccatacgagcgaggtaacagatccattgagacgaagcgaataagaaggtacgaatagatcaagcctgtggcaaaattatgcaagtttccaacaaatgtctgagcagagaggtcactttttgttgtggggtgcattgctcctgtaaatttcaggatggtgtccaatagggagtctgcgcggcggtctaggaggaggaaacaggcacagttgtctgaccttgagtcacaggtaccataaccacctcactcacctggccaggaatgacttccaaccaatgatgtatactgcaagtttgtaggatgcgcactgacatgttgcctcgttatcaggttgaacgactcaaaggtgaaaacgcaacactgttccagcaactttcagatgccaaccaacagttcagtactgcagtcacagacaacagaatcctcaaatccgatgtagaagcgttaagaattaaggtgaccagttcgcttctcacagctgccagaacactgaaagatcacaaactttgcagctctctaacagtaaccaacccgtttgaatttgcaggtaaagatggcagaggatatggtagcgagaagtgctgtatcgtgtggcctaggcgaccttggcctggcaccatacgtgaactcaaggaagatgtgccaagctttgaatgtgctcacagggttggatttactagggagtgatgcgttcaggggtccaaccgcaggtacacgagtacagaactcaccagtacagagcactgcaagcctagagagtctggataaccgaaagtccaacgaggtgaccagttgcgcggcggacatttggccttgagcttcaagccattgatctgattcaaagcttgctccaccctcaaaaaaaggaccagagtttgtcaactcaaatagctggtggcttgagcagagcttctggcacgagttctcttgaaccatatttccacataagctttataggatgcatcactcttttgatgtcacttagtttcaagtataaaatgaagctgtctttgtacaaagctgcaaatgagaagtaaatgaaacgtcctggacaaacttgtgaagtaggaatgatacataggctctatttccaggtcagatgagacagttatgtttacaacaaaaagcaatacatgttgtttagaaaccgctattaattcacaggaatgttcaatccagtacaagtcatctagtagatttgcacccctaccttctagtagattcaaccatgttttcactactacttgctgggactacaactgtacatcatgatggtaaaatgcataactagtgaggttcttgactcgaaaccttcaggcattgtcaattgtcacttctacgtacacctcataaaaatttcaggcatctgcagaactgaaaactgatgtttcatagaacaggaatttttgttgtagtactcttggggaggttgttgtttacctattttgaaccttcctttttattattataatcggtagctctcctgtcgggctcgtttccaaaaacaaacgaacaggaacatttgtagatggatcatcttttcctcgtatttggtttacttcaagaatttaattcagaacatttcctgagaactaaaaatacaggtaatggaagaacgagaatgacaggaatcatacaaaacaagggttgaccgggtaaaattctcaaagaagaacaaaaccttttacttcgaagcaaattttgggtaggctacagttgaaacataacagaagctacaaatcaaggttgagacacttggatagctttttcattcactcatattaaagactaaatcttcgtgcatattccatctttttaattctccttttactatatcttctcatatcaacttcgatattttcatgtctctcttgctattactattgtgccttatgatccaatgcgcactagtgtagctagaggtctcagttggatatgttcaaatcatttcaattggcgttggacaaggtttttttcaattggtgctacccctagcctatcatgtatattatcgttctagacgcaattccttcttgtatgaccataatctatcacaatatacacttatctatttgaacaagatatctttttgtaggtcaatattctgcaccatacaacatagcagatctgatcgttgttctataaaatttgcctttttagcttttgtggtaaccacttgtcacatggaatgtcagatacctgatgccacttttcccaacatactttgatcctataactaacatcttcatcaacatcattattaatatgtagcactgatcctaaatatcgaaagatatcctttctagatac

SEQ ID NO: 434 - protein, 282 aa, Zea mays
MKKCASELELEAFIRESGEDARAAAGGSSPGCGGSSDPGGSGVFSPGFGFADSDTMDGGSWWYGNVRTPNPVMSQAASISASPGLTTSANHALESESDSDSESLYEVEGVPYERGNRSIETKRIRRMVSNRESARRSRRRKQAQLSDLESQVERLKGENATLFQQLSDANQQFSTAVTDNRILKSDVEALRIKVKMAEDMVARSAVSCGLGDLGLAPYVNSRKMCQALNVLTGLDLLGSDAFRGPTAGTRVQNSPVQSTASLESLDNRKSNEVTSCAADIWP

SEQ ID NO: 435 - DNA, 9054 bp, Zea mays
cagccttccgcatgctatatttgaatctcaataaacggtgctaggggggttttagcaaaagtacttcaatgttcaatactgtcttaatagacgtccttctctaacatcaaggagtacattgcgtacgggccctatttatttcggtttttggctgttagaatcggcttttggcagccaaatattttgtttttcagattgcttacatgagaatcgcgtctgtaaaaatcgtctaaatcaacgttaatataaaatcctaaattgtgcagagccctccacctttcttaacacacaacacaggtctcaggatattcaaatccatataagagctagattattcagtagtccagattccgaccaaaactctttaggatgctatcacaaacaaacatgtccatattctttcgtgattttaacgtatcgttttcgtgccctctaaccaaaacactcccaaacttgttttcgcttttcgaaaggaggctcgaaattatgaaactaaattttaggaataaagacacaattgcgacacaaaaataacctttttttacccaacttcacaccaccatatgtaggtcttcgtgctaccggatttgccaacacctataaaatttatgtcaggttgtcacggctttactattatcgcgtctaacttcaaacacatctggagatgcattgatctcgcgcgcggcttgaaaatttagttattaggttggtaaaagactaggttaggtaagaaatttgaaaacaaaaatccatgggagatgtttttacgtagaagaatagtgagaatttgagaaactttatttcctaagaaacaaagaaagttttggtgaaataattgaaacgaaaaattcgagaaactagaagcccgataatgcccttctcctctaccaactaccagcgcagtcactcgcctctgcacacgtcgctgatgctcgtcttccttccttcccatcctttataaggcccggccgcggctctgctcgcctctcctcccttccctcccgtaccgtatcagtctcccggattctctccggttcgtgggagggccaaagcttcgagttaggaaaaccctaccgctgtgggagtagcctccggcgatggctgcggcggcgatcctgccggagctggcgacgcaggtgctcatcccggtcgcggcggccgtgggcatcgcgttcgcggtggtgcagtgggtgctggtctccaaggtgcgggtcacccccgagcgccgcgcggacggcggggccgtgaagagcgggcccagcgactacctcatcgaggaggaggagggactcaacgaccacaacgtcgtcgtcaagtgcgccgagatccagaccgccatctctgaaggtgagaggctgagcgctggctctgtgtttggctggttgcatatactcgcgcgcgttttaatttcgctccactctttgtttgaagttggtacgcgggggtgcttcgattatttgggttggatgctgttggaaatgatcgaaaccttacgtgctttgcttattggcttaggcacgaccgcacgagttggtgctctggatttgattttcgaggaaaaggatcgtgggaaataattctgttcttgcaacatagtactgtatatgtttatattttgtatgttttgtattttataaaaaataaacgattctatttaacgatggtctcccaatcacctctgttacggaatcaactttgatttttatcggatgtcttgcttgctagttgctatgtgacgagacggttggaggaaacaatcatttattgcggcttatgtgttgccttgctcggtgatgtgagaacgtcgtgcgtacgcaagtttcatgtttggacatgagacttttaatcagttcctagctttaataaaggaggagacagcttgtttgcaaacgacaagcaaaggcgctactcttttcacggtcttttttttttcttgttggttttttttcgggcgggatgggggtacccgtacccgaataactcagagagttgctaaaccatagatgtctgatttttgctttattttcagatggcaaacaacatctatctaatctacaactatcagaacttagacttaaatcttagaaccgaataccttctctcttattgctagtttatctttgctagtttatcttcacttacggaaatgtgaataacttaatattgcattagtgttccaaccttccaggctatggatctacggacggccttaaactagctgttgtctctactttatgcagcagagattacactaagcttttgtagttaattgaaccctaatccttggggcacagctaattctggtccacctagatatccttttagaggtatcttttgggaatgtgtgggcgtggtcaaaattggtcgtaatagtttggtcgtatggtcagaagctgcctgtggggtaacagatgaggggataagtcccagcggtctgagaagtacacaggagtggccagtggggttgcagataaagagataagttctcgcagcacgtggtcctcgctactcaatcttcactgcagctgatattaactgtagtcggtccagacttcatcttgtgggatccacatggtctacatcctgccgcgctttggtaatttcataattcattgaattccttgcatgtgcacatgtgcggggaagtactgatgcagatgaattgttgcactttgtattgtgttccagtaagggggtgtttggtttgtagggactattttttagtccctacattttattctactttagttacaaaattatcaaatatagaaactaaaactctattttagtttctatatttgtcaatttatatactaagatggaacaaaatgaagggactaaacattggtccctagaaaccaaacacactctaacatttcagacctaattgttgatgtactcgtggtagttcttatctaatctaataatacgaagataacgataaatatgtggtagctatctttctgaattaacgattggatgatatctcatattcatcgttgatgatacctgggagcaataatcgtgtaggtcagtcaaatgtgaccttttctgtgaaggtgattgtgtgtttggttttactgtttacacaacgggcaagagacagatcatgtagtttctgtagctttagcagtgaaacttagtgagctattttctccctaattaccgaactattttgacattcactagttgctgccttatttgctaagagttcatttaaaataagctgacttagtataggcatttttaaagcttgttgagttggatttggttagttctcaatttcccgttgcagcaccaattgcctacggcatgttgtagttgccggtttagtcttgatggataagttttcaatggacctcgtggttttcatttaagttagcactgaattaatttgctcttaaggcagctatcagtctgtcactgtttaccatttatctgtagttctctgttccagttggtttgatgttgactcatgtacctgtgctgttctgaccgtgacaacattaaaaggtggaaaactgctattatctaccgctagaatcttaatttggcttgttttttcaggatgcgtaataaaggtacataaattgagcaacttatacccagtctacctaaaatgggtttgattgatcaaatccatgcatgcaagtgatgaagtgaaggattgcgatgctcctccgttccaaattataagatattctaactttattggagagtcaaaacatctcaagtttgaccaaaattattacagagagaattacaaagatttatggcattaaataagtaaaatatgaaaatagaattaatgaagaatctaacaatgtaacaaaggtacataaattaagcaacttatacccagtctacctaaaatgggtttgatcaaatccatgcatgcaagtgatgaagtgaaggactgcgatgctcctccgttccaaattataagatattctaactttattggagagtcaaaacatctcaagtttgaccaaaattattacagagagaattacaaagatctatggtattaaataggtaaaacatgaaaatagaattaatgaagaatctaacaatacttatttagtatcataaatattattactttattatataaatttagttaaacttgagatgttttgactcttaaaaaaagtcagaatgacttataatttaggacagagggactgagggagtataaaacttatcttcttcatataggatcaaagagctgttcccatttaggcctgtttcatagtgagcgcagcaattctttcacaaggtaatattgtcatgcacatagaagtagagggtttgccattgtaggattttgcactccattgtgccactgacgtggtgaacgagtggcaatcctcaagcgccagaatggggtggcaaatactcgaacttgctttattttagaggtgtttggggttcagtatcatcagccttgaattttttgttacttcagagtcgatgttgttctgtagcatgctttgctcatttcaattttttatttagcaaaccttaatacactgtctgccactactgaacaactttgccatccttttccttacttcgttgtgaacaggagctacatctttccttttcactgagtacaagtatgttggattattcatgggcatctttgcaatccttatattcctcttccttgggtctgtcgagggattcagcacgaagagtcaaccttgccactatatcaaggaccagacttgcaagcctgcccttgctaatgccatcttcagtactatagcttttgtgcttggtgcagtcacctcactagtttccggctttcttggaatgaagatcgcaacttatgcgaatgcccggacaactttagaggccagaaagggtgtcggaaaggcatttattactgccttccgagctggtgcagtaatgggcttcctgcttgctgccagcggtcttttggttctttacattgctatcaatttgtttggaatttattacggtgatgactgggaaggtctttttgaagctattactggttatggccttggtggttcttctatggctcttttcggccgcgttggtggtggtatttataccaaggctgctgatgttggtgctgaccttgtggggaaggtagaaagaaacattcctgaggacgatccaagaaacccagctgtaagaatttattcacttgaattgttaaagcttccagttcttaagtgctatcttgctacactgcaactgcatagtgttcatactttttttctcgaacaacgcaatagagcaacgtgtcattttattaagaaagaataaaattatgagtccttacaaggaccaatctgagtacaaggaccaatttgctttcggtcatagcttatagctagcattctgcttgccatagtactagattggcatctgcaccatggtgtaagaatgatatcttgatgtacttgcaggttattgctgacaatgttggtgataatgttggagatattgctggaatgggatcagatctctttggctcatatgctgaatcatcatgtgctgctcttgttgtggcctctatctcgtcttttggaatcaaccatgaatttactccgatggtgtaccctcttctcgtcagttctgttggtattatagcatgtctcataacaacgctgtttgcaactgatttcttcgagataaaggctgtggatgaaatagagcctgctctcaagaaacagctcataatttccacaattgtgatgaccattggcattgcactaatcagttggcttggtcttccatacactttcactattttcaactttggagtccagaagacagtgcaaagctggtatgcaaaaattttgattggccattgaagtttttagtataaagttcgtattacaatatttgtgttaaatttatcaggcacctgttcttatgtgtagttggtgtttgcgctggctaattgttggttttgatactaagtaattcatatttcagtctcattctaatttaaatttatcaggcaattgttcttgtgtgtggcggttggtctctgggctggcctagtcattggttttgttactgagtactacacaagcaatgcctacaggtatctagaatcttttttttcttgctagtgagtatgatggtagcatttcttgtttgcttccaatgtatgacatatttgtcgttttgtgttccagccctgtacaagatgttgctgattcctgcagaactggagcagctactaatgtcatttttgggcttgctttgggttacaaatcagtcattatcccaatttttgctattgcgtttagtatcttcctcagcttcagccttgctgccatgtatggtgttgctgtggctgctcttggaatgctgagcaccattgccacaggtcttgctattgatgcatatggccctatcagtgataatgctggaggaatagctgaaatggctgggatgagccataggattcgtgagagaactgatgctctagatgctgcaggaaataccacggctgcaattgggaaggtagacatgtgcttgtcttatcagaatttcatgtgattgcacagcgaactaatgatatttcaagttttctgctttttccatttgcaaatgccagttaggattcatacatagttgtaatcttgcatgtgctttcatttaagagcttggacgcccctataaactttagtattttctatttagatcattttataccaccttcaatgcaattggttttgctagagaaaaaatctcatggttttgtatttgcagggttttgccattggctctgcagccttggtttcccttgcactatttggtgcgtttgtaagccgggctgctatctccactgttgatgttctgactcctaaagtattcatcgggcttattgtcggtgctatgctcccgtactggttctcggcaatgaccatgaagagtgtgggcagtgctgcgctcaagatggtggaggaagttcgtcggcagttcaacaacatccctgggctcatggaaggcaccacaaagcctgactacgcaacttgtgtcaagatctcaacggatgcatccatcaaggagatgatccccccaggtgctcttgttatgctcacaccactgatcgttgggattctatttggggttgagaccctctctggagtccttgctggtgcccttgtctctggtgttcaggttggtgggagttcctcgcaaatttcgatatgatacttgcacccgagtttttccttattacatttcaccattttcagattgccatttctgcatccaacactggtggtgcctgggacaacgccaagaagtacattgaggtaaagttacacgcagactttactgggccttgttttccctgcctgaacctgcataacaccttctctaaaaaggctttttttaagggaaaaaattatttataacattttgatctttggtttgctcaggctggagtttcagagcatgccaggacccttggcccaaaaggttctgaccctcacaaggcggctgtcattggtgacaccattggagatcctctcaaggacacgtctggcccttccctcaacatcctcatcaagcttatggcggttgaatcccttgtcttcgcccccttcttcgccgcccatggtggcattctcttcaaatggctctaagccagcgagagacgcaggataaaggccgtagttttgcaaggcgagtagagcagtatgtcagtaatacagcatctatggcatgtgcttttgctcgtccagttcatgagccccgttgtgtatttggtttccgttttcttggttggagtttttagttccaaggtccgatcatgttttgatcccataaattctcttccagccttcgagcaactgagtccatcttcctaagtcatcagccccagcgagacattgaagcatggggaaacttaaacagtatggtgatgattaatctcagcattttttttcttgcagcaatcaatatggactttgcttaaaatttcgttgtcttttcaaaacgatatgcaagcaaaatggaagtgatgttctttgaaactttgtttcaatgctatagcaaaggtttgcattttacaaagttcggtttagtgacgaccatttagatgacatagattatgcttttcgtattttggtagcttctcgtgcggacgcgcggtcatgcctagcatgccgaagaccttgtcatatagtgaaaggaattgcggtagcaattagttcatttttccctaatcccctccaatcactttctcaccaaacaaactccaaaggtcgtcaccgaaggggacgttcctcccggaatactttggcaaattctgctctgtccttgcaaccaagcataacatacaagtgaccgaaatagacaagcaaagtatatcagaacattgtcaaattgcaagttgcaacaaaactgaagcaaacacaatgtagaaaccattcggagcatcacaggggttggtagcaatctgagatacatgattaaaggaatggtttaatagtacatgcacaattaaatgtttctttttgtttccaagctaggctatgaattgtccacgatcaagctaaaaccccctacccactaaacaggagactgctaggcaggggcgaacagggagcattcctgcatgtaagcaaccagccaaccaaatcacagccatctatcatttcctcttcttagtaggtggttgggggacatcatcgtcatcatcctcttcctcttcttcctcctcatcttcctcattgtcaccatccccatcatcatcgtcgtcatcatcctcctcttcatcctctccaccatcatcatcgtcgtcacttcctccttcaccgttggctgcaggatcgttatcatcgtcgtcgtcatcttcctcctcattcccattgtcatctgatccctcatcaccaccatcatcttcttggttttcagcatcctcatcgtctccctcctcatcattatcatcatcagactctccatcatccttgttctcgaaatcagttgcatttttgtttttgctcagaatccttgtggagaaggaaacaaacaatcctcagctttgggagacga

SEQ ID NO: 436 - protein, 766 aa, Zea mays
MAAAAILPELATQVLIPVAAAVGIAFAVVQWVLVSKVRVTPERRADGGAVKSGPSDYLIEEEEGLNDHNVVVKCAEIQTAISEGATSFLFTEYKYVGLFMGIFAILIFLFLGSVEGFSTKSQPCHYIKDQTCKPALANAIFSTIAFVLGAVTSLVSGFLGMKIATYANARTTLEARKGVGKAFITAFRAGAVMGFLLAASGLLVLYIAINLFGIYYGDDWEGLFEAITGYGLGGSSMALFGRVGGGIYTKAADVGADLVGKVERNIPEDDPRNPAVIADNVGDNVGDIAGMGSDLFGSYAESSCAALVVASISSFGINHEFTPMVYPLLVSSVGIIACLITTLFATDFFEIKAVDEIEPALKKQLIISTIVMTIGIALISWLGLPYTFTIFNFGVQKTVQSWQLFLCVAVGLWAGLVIGFVTEYYTSNAYSPVQDVADSCRTGAATNVIFGLALGYKSVIIPIFAIAFSIFLSFSLAAMYGVAVAALGMLSTIATGLAIDAYGPISDNAGGIAEMAGMSHRIRERTDALDAAGNTTAAIGKGFAIGSAALVSLALFGAFVSRAAISTVDVLTPKVFIGLIVGAMLPYWFSAMTMKSVGSAALKMVEEVRRQFNNIPGLMEGTTKPDYATCVKISTDASIKEMIPPGALVMLTPLIVGILFGVETLSGVLAGALVSGVQIAISASNTGGAWDNAKKYIEAGVSEHARTLGPKGSDPHKAAVIGDTIGDPLKDTSGPSLNILIKLMAVESLVFAPFFAAHGGILFKWL

SEQ ID NO: 437 - DNA, 5374 bp, Zea mays
gtgtgacaaatcattgttgttccatctaattcagcaaccccaaacaccatggagtatattgcgccaatatggtctcagaaacgacctaatgcttgcaagagccaagaacgctgtgccgtgcttgggctgtagcctcggcccgtagtgttggcctggcccgacacgattatgtatatttttattttacaaaaaaacgtatatatatacaatatatattcaatattaaaaatatttgagcataatgttttactggttatacagtttcacccagtgtctcccgcccttcttttatcagggcatgggttcgaaccccacctcatacaccgtttttaacattttatgctaatcaaatgggtcgacagattaacgggctgacccgacacagtcagcagaccggcatgacgtgcctgggccaaagttgtgaccctcgggaccctcgggtgtctagcccgtgccggaccgtcgtttgacatctatgggcgtgtactggaccgtcgtttcacatctataggtgtgcagcgggttaatttgaaataactgtgaggcattaaatcggtgttttaagtataatatagattagaaaaccagtatatcaatgaatatatcaatgaatttaatatcatataggtatatattctatatgtaattatttttatcacgcgcgtgtcgggtatgcactttcactgtttaaatataaaaacaagtttatgtatcttatcggtaaaactgaatacttgagaacaaatcattgaatagtctattgtatgtatacggtttctagaacaaatcaatatttgaggaaccaggttgaggctagaactgttgtcctcaaagtcgaaccgtacgatacgtaatttaattctaccgctgacttcacctggcatcgcagtcgcaccgcaccgtccgttccggtagaacaagtcatcaatatccgcgaaagcagcccgtggaaatggaaaggaatgctacagaaccaatcaacaagccaagccaactgaccccttccgtcccggtgaagtgccaaacgcgtgattccattcgggaggcaggttggtgtgcgttgagccgttgattcctgcgcactgcgctgcgcctcaaggccaacgcccggcgaggacaggatgaggggacagcgggcgacgagagggaggaaaatcccagtccaactctaggcgcttcccttctcccttttcctttcttcttccctgaggcgccggccccgctcaggtcgggacctgccgccatttcagaactcctagcttcttctagttcgtggttgctgcgcgccttgcgtaccctggtacggacctcgatgcgtttttctttctgccccctcctcctgccatctcggttgatggattgctgtaaggtgtggtggatctcggtggattgctgcgaggcgtggcggattcgttgccggctcgtgttccgatgacacgcagtagctagagtttctgttctgctacattcctggctttcttgttatctgtttattgctagttcaccgcttgaatttgatcggacgtctccaccattgagcatgtggagaatacgccaattcggagatcttgcctaccttttccgttcaacggatgttcgtctgtgtacctatcatattcatctgtcagatctattattcttctcccatcccatatgattaattgggacatcatcgaatgtgtcattttcgccgtttatgtacgttatcctgagagaattcaatgggcccttcccagcttatcgagtttctctagtataattgagttttttatcttctctttccttctacgttgttaacagtacatagaacatgtaactatataattagttgctgccggcacctgtacctgctcattttcatattccaattttatatgtccaactggagccagatggtaaatcatctgttgcctttcctgacatggcagggctctggcccacataacaatagaatattgaatatttaatacttaatctaaattatagttttttaacctactttttttcacattcaaatgataatgaatataaacatatatgaaaactacatttatatgttacttaataaatatataattagtctaaaacgaattatattttagaatggagggagtagaagattgtttctttcctggatagcaacaactgaacacgtcggtgttatttgcaaatccagagctgggcccaaatctgggcatggtctattcctcatcttaactcaatcagactccacatatttatgtaaatattctgaaagcgaaagcaagtattactctgcagtgtctcactttgcatactatcaccagtgttgtgtaaaatacctttgaattatgttgtgagattgaattggtggtgtgttattattttgtattgtttaatattttcttatgtgtcatacatcatagggttgagcatcattggagtggaagaaaggaatcatgttcaggagaaagcatgcttctcattccaactcaagtgatgctgagcagcaagaagcaaaggtaactgtgataatcgtcttctcatcatagctcataagtttttgttcacgtgaagattttagagcctcctgtgaattcttatttacttggaagcccatagtaaatcatgctacgagtatgccccatagtccatagatgagtgctttgttcatatacttgttttatgactatgatccacttattttgcaatgaaacaccagagcctcaaggggcttatctatagcatgttatgtttgtgtgtcagtactagttcacacaagcctggatttaactatccaactgtatacatacatagctgtgtgttattgttgcagacttgcccttgggcctttataagcttgacaaacagttttactatctgtattttcctggttgatttctcacataatgtggcctacgaacagataaatgaattaaaatctgcacttggtcctttgtctgcccatggcgagaagtactgcagtgacacatgtttcagaagatatcttgaagcccggaactggaatgtcactaagtcgagaaaaatgcttgaagaaagtctcaaatggagggcaacttataagccagaggatattcgctgggtaaatgtgctcaagttactttgctctctgaatcctggtcaagtgaccaaacaccatgctaactgcctttcagcctgatgtttctgttgaagcggaaacgggaaaaatgtacaaggcaaattttcgagatagagaggggagaactgtaatcattatgaggcctacaaaggaggtaagactttctcttttgaactgacatccttgcgtttttttatttcttctccataaagatcatcagtcttctttacttctataaaatttcacgtgtatgtttgtataaaattccagaattcaacgtcccatgacggtcagattcggtttcttgtgtatgttttggagaatgcgatcctggaccaacgtgaaggtcaagagaaaatggtatggctgatagacttcacgggatggacaatggcccatgccacacccataaagactgcaagagaatgtacaagcatcctgcaaaatcattaccctgagaggctggccattgcatttctgttgaatcccccaaaagtattcgaagccttttacagggtaaaggcttttaaacctcctgcttttgtaaatgttatatttgtgtttgatttacttcacaaagattcaaaatctatttgtagaatcgatgcataaaattatgctcctgttttgatatccctatccttactcaagttttccaaattcttacaggctgttaaatatttccttgacccaagatcgatcgagaaactgaacttcgtgtacctgaaggatgaggagagcatgaaggtcctgtacaagtgcattgatcccgtggtccttcctgtggagttcgggggaaagaacagtgttgtgtacaaccatgaggactactccaagttgatgctgcaagaagatatcgaaacatcaagcttctgggaggatgatgcgaaaactgttaaccatgctatcaatgggaccttggttcctgatgttgcatctcagctgtcacggattgctgctaaagccagttaatgagctactacgatgggagctattcagaatgctttaatggagtaactagaaagtcgagcgccaataaaatgttcatagtaaacagaaatagagcaaataacagatgagatatcacttgtccatagtcgaaatagttgcacttatcgaacactttattcagtacacgatgagttacaggagactatcgtaatgatgtaagaggtagaagtgctacctgcttaatgtacctcaaaagcccttaaggctttacttgttttagccgtggctacggagaagctaattctgggttatggcttttaaaatgctggttctatatttggatttgattatggctgaagtagctcaccatcttatggattctagtagtagtggcactccgtcgcaaattatagtgtactttagatgtatcgtcgcaaacattatcatgctgtgatttcaacggccttatgatatacaccctgttgaacatctggaaggagagaaatctgaggatatttaaaaacagcgccctcacccctatccaattagtcctgaggattaaagaggacgtgttcattttcaagagagctatattccccagtattagggctgctgcagtggtttagctttagctgctttgtgcgggtctattggaaacgttccttacgttgtgtttgctagtttgtcttgtctcggtcctcagatctatacagtgtgttttctgaactctctccttttattgattaggcagagttcctgtcatttctttcaagaaaaaacaaccgtatatatcactaaatcaacgtggagttattttttgagggagatagtgatgaagatattactatgaaaaaagctaagagataataagatctgcaaaaacaacctcacgttgatttagtgatgtatgcttagacgtggtactgaaaagtttgccttaaattaggaaaggcagaccatgcacatcagtcttgtgttacattttttaactttaattaagttttttaaaatgtattatctccaagttaaaaaatgcactattaagacatattttatagagaatttatgaaactaaattgatgttgtaaatatcgatgtatttttctatagaatagacttagtccaagtccaagaatcaagaaagattaatctaaaataaacttaaagtgaactataatttccctgtaatcgagcttgattggtaggactgcatcagcaccatagatcattaagaagggagtgactcgagttgatctattaggtgtcgtccgaagacttcataggactgttggtagttctttcactccatctgcctacaaatgg

SEQ ID NO: 438 - protein, 295 aa, Zea mays
MFRRKHASHSNSSDAEQQEAKINELKSALGPLSAHGEKYCSDTCFRRYLEARNWNVTKSRKMLEESLKWRATYKPEDIRWPDVSVEAETGKMYKANFRDREGRTVIIMRPTKENSTSHDGQIRFLVYVLENAILDQREGQEKMVWLIDFTGWTMAHATPIKTARECTSILQNHYPERLAIAFLLNPPKVFEAFYRAVKYFLDPRSIEKLNFVYLKDEESMKVLYKCIDPVVLPVEFGGKNSVVYNHEDYSKLMLQEDIETSSFWEDDAKTVNHAINGTLVPDVASQLSRIAAKAS

SEQ ID NO: 439 - DNA, 5616 bp, Zea mays
tgtcaatatatgatatggatcttaatgttgtttaacatttaatatgaaatgaataatcatcataatgttacatctgtaactatatttttatatttataaatgatgaagacttgttcttcatgaactttgtccgatatccattatgtccgaaaggagataatgctttgaaggacgaagatctttaatgtttaataattatgttgtcttgttttataattcagtaataaaaaacaagagaccaacaaatacttcataaaaaatctcatatcttggcattttaatcaattggtgccaatgtaagattagagtttgggatatttttttttgacttttgaaccctatatagaataatcaacgatcaatcatgaatccgtgagattgaaaaaaatatacacatatatataatacaaggactagtacaccacacactatggctgcacatcaaaagaacacacactcactgtgtgtcgccgtgtcgcactagtagtttgcgacgatttgcttcgtctaaaacaacgataaactcaatgatttgtttcttagattttcagcaaactacatttaacgaatagctaacgaatagattactgaatggtgactaaactaaaaccaattactaaaaatacatgccatacattatatactcgatatatataaggggcctcgcagtttcgtagcatgtaaggaatagtttatttgtgagactagtggggttttgtggaaactaaccgctccaccttttgaaattcttcttcttcctggttttttccgtgtggttgctttgctttgcttagcacaggcacagcgcagcacatgaggagaagaagagggagaagagtaattatttactaattaacaaagaagagaagacttcttccttcctcgtcgtctccagcccattccaattcttgattccatcgccccaccatccaccactccccgaatccttccaacctcctcgtcgtccagtccaccacctccacgcgcaatggccagcggctaggcggcaccaaccagaaatcacaaggattcgtttcatccggcagcgcagctctagagcctccatgggcagctacgcgtacaagtactgcatgtgcttcacgcgcaagttccgatccccggacgcccagccgccgccggacgtccgcgccgcccacctctccttcgcctctgacgcccatgccctccgccgcttcgtcgccggcgtccagggcgagtcccccgccgacgtcgaccgcatcctcgccatgctctccgggggccacagccatggaatcgcccgcctcgtcacaaggtcgccggcggcatccacgcccacgctcgaagacttcttggccttcctcttctcccccgacctcaacccacccatcgcgcaccaggttgttgttaatcgaatgcatcattctactagtactgaagctaatttctctgctggtggccgacttattcactgctcaatgcgtcacgtagctgtggcttgttccacaaagactccactactacctgtctgtctgtctcagccaaaggaattgggagccctttctctccgtctctgtcaactctgttacctgctgccattctgtcgggatggggacataaacatcgcagctaccaattagatagctgagtgctagtacacatcgatatcgatgtatagagacagacatgttttcaccaaacacaggaaatcacctttcttattgctcttaactctaggtggcttcatgtgcctttagattgcttactatccattgctccctgccatctcgaactgaaagctccagacaaaacacaaaacacggacttcattatagcaaattgtttttgtttcgtcttactaaacttcgcctgttctctcatcgtttttaactctttgcccaggttcaccaggacatgtcagcgccgttctctcactatttcgtgttcaccgggcataattcctacctcactgggaaccagctcaatagtgactccagtgacgtcccaattgtaaaggcgttgcagggaggtgttagagtcattgaactcgatatgtggcccaatccttcaaaggacaatgtcgatattcttcatggagggtacgaatgctgtttttctttgaaacattttcactttttttatagcgcacggatatatttgcgtatgaaagcaactgcatgtgtgagaggaatgcctcagaattttgcttagcttattgctttatgtaccatgcatcacctttcttttctaaggaaatcaccctctcacttcacaaaatgtttccctgacttatttttcttcgcatttgaaaggacattgactgccccagtggaaatgatcaaatgtttgaagtccatcaaagaatacgccttctgtgcctcaaattatcctcttgttattactcttgaggatcacctcacaccagatctccaagctaaagttgctacggtatagtctacttaccacatcacctcattgcagatatcatgtttgaaaccttgattctaacttcaggctgttttatagatgctcactgaaacatttggagatcttcttttcgtccctaatccagacccgatgaaagagtttccttctccagcatctctaatgaagagaataatcatatcaaccaaacctccacaagaatataaggagtttctcaaagctgagaataatcgcagtggcagcggaaacatagctgagttgccagaccaaggaagcctgagaagaatagattcaaatgccgatgaatctgatggaaaggtctgcaatatcactgccttgtcaagaccacacccatgatttaacaaaaatgaatgaagtaaaccttttgtcataaacaggatgaactggatgagcaagacgaggaagactccgactccgacgatcccaaatttcagcaggatacagcctgtgagtataggaaactcatcaccatccaagctggcaaaccaaaaggccatttgcgggatgcgctaaaagtggatccagataaagtcaggcggctttctttgagcgagacacagttagctaaagcgacaatctctcatggtgctgaagtcataaggtaatttgtgtgcgcaagaacactagaagattttatgctgaactggtatacagttctgtggacttcgtgaactcaatattttgcttatgctcttaaatcatactcctctgtttagaccataggagttcaacagttttagattgtagtctttacattatgtaattgattcgaaaaaaacggaaaaataaactgccagtgcggccagggttacagggcacatatgatgattcgataaacgtccaaatttgcctagtgtcctgcaaaagataaccaacacaaaatgataaaaacacaaaatcacctatctgcattaatcgaaccatctaagttcttgctgaatcatctaagttctatttaggttcacacagaagaatatactccgtgtgtatccaaagggcacgagggttaattcttcaaactacgatccaatgaacgcctggacccatggtgcgcagatggttgcattcaacatgcaggtgaggtttcagttgttagctgccatgagcctctgattcccacttccttgtcgcagttttatacttacttgcctaatgttaggatgtgtgagacagagcagtaaggcatgctttttttttcattttccagggccatgataaagcgctccggttgatgcaagggtttttcagagccaatgggggctgtggttatgttaaaaagcctgacttcttgctaagaacaggcccaaatggggaagtatttgaccccaaggctagtttgccagtgaagaaaaccctcaaggtaggtgtatgtgtgtttccaagacttgacaacagcgcacattgagtttttgttcaaagtatcagtcaagtaatttgctagatgcacaagcaggtgaaagtatatatgggagacgggtggcgcatggacttcagtaaaactcatttcgatgccttttcgcctccagatttctatactagggtaaggcaacaaagcatgtgttgatctaacggaccagaagactcactttacacctaaggactgtttgcacaacagtcgtgcaatagacaaggtaaaattacagtgatgtgatctcgtgcaggtagggatcgcaggtgtgaaggcagacagtgtgatgaagaagacaagggtgattgaggaccagtgggtgccgatgtgggatgaggagttcacgttccttctgacggttccggagctggccctcctgagggtagaggtccaggagtacgacatgtcggagaagcacgacttcggggggcagacagtgttgccggtatgggagctgaagcagggcatccgtgctgtgcccctgcacgatcgcaagggtgtcaggtacaagtccgtcaggctcctcatgcgatttgattttgtgtagccgagccgagccgccattcagattcagcttcttctttttttcccttcttgtgtgaattgaatgtattactcccttccttccatcttcaacgtatatgtgtatgtatgtacttatttttgtcggaataaaagttgtatggaatggaatggaaggaaggagtagaactgtcttcaaactccagcttctagatctgtacgggtgattcagttttacttgctggcacattgtttgtctgtttactttactggagatagatttgtacatgagcttgattattcttcatttagctactggctaagagatagattagccaatgtgtttgaaagcctttatcatggctatatgaataatataaggaggacacgtctttttgtatctccttgggtttgtattggctaagagatagattagccaatatgtttgaatgctcagagctttaggaccctagtgcccatgatcaatgtcgagaggccctcgtcaccgttaggccctccaatgaacccttggagccaggggtggatccgggattggatcaaatgaaggactataagttaaagcatgtttggcggagccaccagcagctatcttgggggtgagtgccacgacgacgtcctcgcaggactgatgtactagagtgctacagaaggtctgccatggtgctgcttgcaacaggggcgaagccaggatccaaaaatagagggggccaaattagattaagaggggctgttagaagcattttttttgcactatttacatgagaattagctaaaaactaacacgtcctatagaattaggggagcattaggggggacattgctcccataccccctgtcgtcgcccctggcttgcagcctgtcccttgcgttggtacatgcgcgctgctaactattagatgtgcattggccgtgcgcgctagctcatgactgcgtcctgtgtggtggcgtggatttgcactgctgaagcatggacggggtccagtgtggatgcgcgcgctaccacctagcatgctggtggcactgatggaggctaaatacatgtgctgaatgacacgatcagaaagaaggttgtggtctatcttagttaacctttataggatgtatttatgttataatatactcccacgttccaaaatagttgtccttttagctcttggtttttatgtctatatttaaatagatgattaagtatcccttaaatccaggtgtgacaataatat

SEQ ID NO: 440 - protein, 586 aa, Zea mays
MGSYAYKYCMCFTRKFRSPDAQPPPDVRAAHLSFASDAHALRRFVAGVQGESPADVDRILAMLSGGHSHGIARLVTRSPAASTPTLEDFFAFLFSPDLNPPIAHQVHQDMSAPFSHYFVFTGHSSYLTGNQLNSDSSDVPIVKALQGGVRVIELDMWPNPSKDNVDILHGGTLTAPVEMIKCLKSIKEYAFCASNYPLVITLEDHLTPDLQAKVATMLTETFGDLLFVPNPDPMKEFPSPASLMKRIIISTKPPQEYKEFLKAENNRSGSGNIAELPDQGSLRRIDSNADESDGKDELDEQDEEDSDEDDPKFQQDTACEYRKLITIQAGKPKGHLRDALKVDPDKVRRLSLSETQLAKATISHGAEVIRFTQKNILRVYPKGTRVNSSNYDPMNAWTHGAQMVAFNMQGHDKALRLMQGFFRANGGCGYVKKPDFLLRTGPNGEVFDPKASLSVKKTLKVKVYMGDRWRMDFSKTHFDAFSPPDFYTKVGIAGVKADSVMKKTRVIEDQWVPMWDEEFTFLLTVPELALLRVEVQEYDMSEKHDFGGQTVLPVWELKQGIRAVPLHDRKGVRYKSVRLLMRFDFV

SEQ ID NO: 441 - DNA, 11018 bp, Zea mays
tttataaatgatattgatgaatatttaatatatacacgtactaattaatatatgtacatataaaatgtacaagcaagtagttttttttcaaagggacatgtatataaatattaagggtagctctttccaataggacattaacacaaatatacaagtaaatagtatagtaatatatgtacaataatacatacaaatgaacagcaataatagttcttgaattgcttcaatcttttgcaaagagagtagttctttccttcatctttataaactatgatttcaaaaaaaagtattcttatattaaattcaaagctgaaatactttatcaaacccaaattaaacccaaagagagtagttcgtttctttcttcttcaagtgttcgtcacatcggcattgtacatatatacataaactttccttcctttcttcacgcttcacctttaactcggcactggtgaaaacattatgatagacggaactagcatggattacaacattaataataaatatacgctaaaacattctgatagataaagactgataatgtgatcaatagtacagacaatagttgatatgttgatcgataagagttaggtgcattagagcatctccaataataacaataatacctcaaactggtgtctcaaattgaaatataggactctacacagaaaaactactctaacgatgtcttattttataaaatttgattaaaacagtataaagcattttctcaagtgcctcaaatatattacaccatagtgacttccctataatatagatttatggttttaatgttgaagcagaatgttttttatgccataaattctataaattatatttatttttaaattataaagtatttttatgttatgctgttggagaaccactctcctagtgaacaccaactacccaaagagagtagttctccctctcgcacccacgcggcagcccccacggcgtgctataaatacttcacgaacggcccggatatctccatccctgcatcgcaccctcccgggccgccttctcttctccagcgtccgatctcccactcccctccctcaccgcagctctcccacctccgccctccccccgcacgcgctcgccacctcgccctcccctccacgttgctcgcacccgcgcttatataaggtatgcctcttgccctctccaaacccctccgcgagggcctagggtctggcgtgctgagctggagctgatggatctagggtttgggttgcggtgatggtcctgcagtgcaggaggagctcatggcggaagctccggcgagccctggcggcggcggcgggagccacgagagcgggagccccaggggaggcggaggcggtggcagcgtcagggagcaggacaggttcctgcccatcgccaacatcagtcgcatcatgaagaaggccatcccggctaacgggaagatcgccaaggacgctaaggagaccgtgcaggagtgcgtctccgagttcatctccttcatcactagcgagtaagtgcctcagctgcggctgactcttacttttgcttggcttgttgggaatttggagtggcgttcagggctttagcttggctggggttttgtgttgacttgtccatgtccacgtttttttgtccgctctttgcagagcgagtgacaagtgccagagggagaagcggaagaccatcaatggcgacgatctgctgtgggccatggccacgctggggtttgaagactacattgaacccctcaaggtgtacctgcagaagtacagagaggtgcgtacggtgtttgggaatttgggggtcaggtcgtgcaatcgccaatctgtcaccttgtcgatcgtacctctgattgaacttaaataatcctgttgggcatcagcacgctaataagtgataagtgagctatccacttcccttccaatgcttcgggcacatatttatacttctttagttgaggacataaagagaccccatgttcctcgggtaatttgctattttatcactctcagttgtggacttctctattttaccaccaggcccacaaatcatagacacaaatcatagacagagggtcacataatagcagagagcctaccttagaaaggctaaaatagcaattttttcctgttcctgtgtactactccagtaaatacagctagtaaacacattatttttataaggtgaaccaattcgaaagcacttttatccatttaatactgaacagtgatcgaaacctctatttggtgttcttacatgggattgagttagcactcgtgcttgggacgatattatatctactcacaccctatgtggctgtgtctgttctatgatgaaaagtagatgtaatgcaaatggataagagcggaaagagctcctacagtagtgtaattagagcatgttgtagtgcaagcttttggttgtttgaataatgtacctttacacaaaagatacatgaaaccattccactgtaggtcatatacaatcttgcttagggtcacgagtttattgggaacatatctggtgcacatgatgtacatattaaattatcaccatccattctagatctaacgtctttagttgttcattctagatctaacgtctttacttgctctgtataattgtatattttgcaaagaaccccttccgccactactctctaccacttctaccctgctcggagggtgttagatctaggatgaaatgatgaatgatggtgatctaatatgtacaccatgtgcaccaaactcagtgcaccagatatattctcgagtttatttagctgtatttttctatacgcccttcgtattgattgaataatctgtctaatgaggtttctcttttggtcttatgtctggtggatggcatcacggactgcagatggaggtatgtggtattaagctctttgagttgtagttcatagtatatttttgcttgatggtgaatgttatggtcgctagatcggtgagggattggagagggggtatcgatgggcaggaacgtcggccgggggcctctgcccacggccgagcaagaggagggtttctcccttctaattcttgtctgctttatttctcatccattgattacataaataggccggttggctgcccctatctagctagagatccttatctcctaaaaactctcaacaaactactaactgataaccttcctagataatctcaactaatctcctaaataatctcaactaatcttctaatcttatctctaactatccttatctaatccccattagggcccatggctgctgctaccgcagcccctctgtgggcctccttaggtcctgacactacacccctcctggacaagcagctcgccctcgagctgccgcataacgggtgctcaaagaccgagtctacttgcccaaaaccaaacacctagaagacaagccttttacatctcagcttatcttattattccgaatctgatttttttaccccataagataaggcgaacacgcacgtgtgcagccacctggatcccatggacgccatctgcacgaaaggggagcacatgtatgggcacctggaataggtcgcaacaataaccagcggaggcgcccctcgtggcggccggtagcggaatgtggtggcgctaaatagtgtgcccttgttgatgacgaggtgagtgtcttccctaccgccgctgtcgtagagttgaagttcgtcgcccgcgggacacgtatcatgctcgcacttcgagatagcggcctggtgccactgctgatagccgtctgacaaggtgaggtcgcgccgacgtgtgccgaggtcaaccgtcaccaaggctgccttgagcatctgccggcgcatctcccacactttctgtcgtgcaaggaagccacgagcagcagcttgtatgcccacagccgtcgacgtccggagccgtgcggacagcgctagctggtgttgctcatgttgcactgctgccttgatttgcagcagcccttgcatctttgtgagatcagcccttatgttggtccacaaatctcccatcgatggagctggtgattgctgagtcgtggctgcccctagtggcgtcgcccatggggacggagacgccgtcaacgaagatgatgtgatgaaatttggcgttgtccctggggatgggcacgccggcgtccaggatgtggtgacaaaattggcaggcgatgctgcccatggagatagggacgccggttgccaggacggcgtgacgaaggtggcatgcggcgcagcccatggagatggggacgtcggttgccaggacggcgtgacgaaggtgacatgcggcgttgtccatggagatggggacgccgattgccaggatgacgccgcgaaattggcagcagaagccatgggatcagatcgaaacccaagctctctgataccagatgttatggtcgctagatcggtgagggattggagagggggtatcgatgggcaggaacgtcgactgggggcctctgcccacggccgagcaagaggagggtttctcccttctaattcttgcctgttttatttctcatccattgattacataaataggccggttggctgcccctatctagctagagatccttatctcctaaaaactctcaacaaactactaactgataaccttcctagataatctcaactaatctcctaaataatctcaactaatcttctaatcttatctctaactatccttatctaatcccccttagggcccatggctgctgctaccgcagcccctctgtgggcctccttaggtcctgacagtgaataactcttgtttttcatattttaaaacattggtctgtaaatgttttataacgtggaattttgttgtaagaaacttagaattggcctgggtaattggagctagctgatcctgttttcaccctgacttgaagcacatgtgggcagttaaattgtttttgttcacattcttgaggcataacacattaactgaatgcaatggagtactgaagatgtcttttctgggaagtggagggttcttgtgaattggacctttttgtgaacgaatcttcggccagttcatgtattgattccctgctggcagggcaataaaaattagatggatcagtgaatcacatgcatgttctttattagaaaattactagtcataaatgtgctcggagtcccaggtcttcaccatataaactaaagttatttgcctgatggatttgacctccacctgattctgatactatatatttatttggtttcactaagggcatgtttgtttaatgctcaatccatgtggattggacgggattgagtgggattaaattctgagtaagtcaaaatccttcataattttttttccaatcctatccaatccacatgtgatgggaatcaccgaacaaggtctaactgtttggcaagttccaatcctgtacaatgattagtacatggatataatatttttctttctttctagagggtttaggagtagctcttcttattgtccatgatttagttaccaagcttatagaatctgagatatataatgaacattactctgctcttgtttctttaataaccaacagggtgatagcaagttaactgcaaaatctagcgatggctcaattaaaaaggatgcccttggtcatgtgggagcaagtagctcagctgcacaaggggttaagttttcttggactgttccgttattcttgtgatcatactgcaaaaggctaactttctgttacttttagatgggccaacagggagcatacaaccaaggaatgggttatatgcaaccccaggtgattgacaaaaaaactattggtagttgctatttgttgtgtgtttgtgtttataagcacaatgtatagcttgggtctttgctgtagttgtttatttactgggttgcaaactcgagcatgttggattgccagccccttaatttattgcagatgtgcaaatcagttcccatcttgcatttgcctagctctaatgagtattgatttggtgtccccgcaacaatttgctcctgcttatctgtagtgactattgaggtgccccccactaacaaatttctgtatttgttccagacatagcgccacctccatatgttaaagttttttcttggtctataaatggctttttaatgacactggttggcatccatatgtttgctgataacccttctctttcccttctgcagtaccataacggggatatctcaaactaatggaggtatggaccttttctgcgacagctgctcttacctgaggtacaagcttatgctttcagcaaattgctgtgttgctttgattcccatatgcgatatctcatgtgttgctacctttaccacccaggcgattttttttgtcttagttatttactaagacaccttgcggtgaccattaaagagtaaccaatcgccctcaataggtccgtttttatctgccagaactgatgaggtcgctcactaggagtaagtcgcttccctgggaacggttgtcggctagcaccgctcttgtatgtatattaagagtaacttaatgattggtcttttggctgcgatttgattacatgtatttgtatcgggaggcataaatattgtgtaatttgtgttaaagactggtgtaattgaactatgggaagagctgctttggttgtaaccatattttgatgcccgtatattaggcaaaaatagaaggctgtgggcgtgcacaacatatttactgttcaccgaaatacttgtattgatgtatttccgcatcaattatagtcatcgtcagcttgtaactacggcaatgaataaataaaaattcactgagtatataattgagcaaataaaaattatatagttcataaaaacaaatattacatagtttgtaaaccataaataaaaattagcataattcattggtcctagccggccatttggtgggagccaagaggttggatttactaaaaaaatattttagcacatgtttataagcctgtttggagtgtgaagtttaaaatagactgagatagaaaatgagatagcctaaccaccccaacttcagcttcaccaaaaacaaaaacaacagcttttactacatgacaagttggctaaacggtttagtttcactaaattggtgaatgtagaagtcagactcaccgttttgataagcttattgagagttgctccaccaactcaagtttaataaaattgataaaaaaaaatactaaccactatcacccaatacacagtttagtggttcgctgttatatttcgcgtcacttcttctatcctccccaagtatgccccggccataggccatgtccctccctggctcagacaaacctcccctaatagtaataggttttgtcgtctccgtttctttacgtacaaattaaattttaagtttatattttttaaggtgaccgatgatatcgtaacttatgttagaaaaatatattaaaatctgatctctaacctattaaaatgattctaaaaaaatataatatatttttctacgataaagtatgacattaactactaaacaacaaaaattatactgaaaactcaacttatacattaaaaaataaaaaaaacaaattttgttaaggatattaaactaactcaagtagttggacttattcctttcaaatatacatcagccagcgactagcgagcaagaaaacataatgcatataggattccattacattaaccgtgaatagcagaggacaaaggcttccactgccaccaatcatgaaagagtggaagatgcatacaccacaaaaaaaatgctaaacggtttgcagacttctcgatgaccaatgagaagatagaattatctaaatattctacgtaatatgataaaaggattccagaacacagttggttacaaatggcaaatgatacaagaatcatttgatccaagtagataatctaaagactcgcaagcctaaccgttaaatgtagtaatgaacatgccttccccctattgattcaaggctttcactcagtcactgatcacctgagcattgaactgacatataggaggaaattgtgtttatgacaacaccaacacgtacgcgcccaatacaactaggtgaagtttatagagcaaaaaagggggagaaggatatagatgccctagttgtcaatacctaatggccttatgatgctaaagtagtttcaggttttctatacagaacacatcatctaaagttctagatgagagaatcagttgagcaaactacgtcgatatcaacagaaactgacaggaacgcaaggttcgataagctggtttactcacttgcacctgcctgcttgtacatctgatgcctcaaccgaggtatcctctatagtcttctccactgctagagcatcctcatctagtgctttaactgtggcacccagagcagtttcttcggcgttggtggtatttgtacctggtggcgcaaccattgcatccttcagagtattctcaactgttgttgaatcctcatttgtcgcgactgtggcattctctacaggtttcccatctgctgtagacttatcatctagcaccttaacatcctctaccgtttcctcagttgttgtagcttcttcatctggttctccagctgcagtttgatcttcagttatctccctgattattggttcaacaatacctttgtttgctattttctcatctggtgcctctactgtaatttcacattctttggtctcaccagctggtgtgtcagcatctgctttaatttctgttttctcatctggtgcctcaactgtaatttcacctgccctggtctctccagctaatttgtcagcatcttcattattttctattttccccttctcgtctggtgcttcctccttagtttcaccttcagctgtctcctcaactactcctatggtagcagcattattctctgtactctcctcgagtggtactacttttgcctccacagtttcatcaaccatgaccatagagtgctcaatatttgcatcagccatagattcatcttctgaaattcgtcttcccacctcaagttgtccacctgatgcttcaattacagcttccatgttaacagtctgctcaatactatagccttgttcgcatgacacttcaacagtagttttggattccagttcaatttctacttgctcgactgcaccttgtacgacaggttcaacagtcaaattttcagcttgtgactttggatcttcaggtcccactttttgttcagtttcagattgccccactagcttctcaccaggggtttgactttgtaacacaggaaatacagtgtgctcttctggaacttcatccccaacatcatcctcactatgatcttgtgcagtacttggcacttcagtgacagcttcaaatacagcattatctcctggattgtgactctgttttggggccgtggctatatcagtttgcatattatctggagccttctgaggcaactcttttattatagcatcagaatgtaaggtttctatctctgtgggtagatcactgactgacgctgccttttgagtgtaagcttgctcaatgtcacccacttgctgagatgactcttcagatacagatgcagcttctgcaccttccccaatctgattcacatggacaattagctcagcatcaatatttcctgctttctcaagcctgtcaacttcactgacaaatgtactgtctgcagcttccactagacatgtttgccttacagtctcaacttcttcagatgacagttctcctgtaacttttactttatctgttttctgcaccaggtcaacttccatggaatccttaggagcttcggacatattcaaacctagaggaaagacatgatcacatggcagcaacaatcatttgcttttgtggaagttgtagagtagctttattaaatactccctccatttatttttctaaagtgtatttggattcgaaaaaaagaatgtagagtatactttgactatcaattactctcatgtaatatgccatatattgcagtaaaaccaacttgtgttgaactatatggtgaatgtgaattcgttgatactatgtcctaatcatgaatataattagagttatgttggtcaaaatttacaaagttactttttaaatcctaactaagtaactaatatgccccatattttgaaacagatgtaccatgcatggacatgtaaattgcaagaatgtttacctggaatctccaagccatgattttcaggattatttgctgattgtgtctctggagaaagtggcatactgacaagacggtaacttcgaagcgaaggtccaaaagtgctatacttgcctgcagcactaaaagccctttcagcatcgacacgtttcttgaagacaaccttaacagtatttgtttccctatgtacttttgtccccctttctttcagtggaccatagagactgaacatcttaacaagatccagttctgaaggaatagacgctgacctgccaaaggtcaaaacaagtgcagtgggcttcaactcatcaaccatcttctcatcgacatggatgatagatctttccatcacttgtatctgttttttaggaaccggctccccaagttccgacaaaggtatatatgcatgtcttgaggatctccgtttccgtcttggccttgtagtcggactctctctttttaggtcatgaactgggtgattatacaagctcaatccggaccaatacgagtcctgcatatgatccgttgtctctacctcaggagaaggtataacttcttttctcttcctccctcttctagatgtacctttatcaacaatgtttgcttcagtagtagtagaaacaatatagtttctgtaatcgttgaagtaaccgattatcattgctgagaaactatatccattcattggctctgttgcaaccaagcatagttgtgacagtaattccctgggatctgcagcgtgatttatgtgcagacgcctcctttttgctcgtttctccacagtaagttcatcaccagcatcatcactagagacatcaaattccccattctctccttcagcagcgttattatagactg

SEQ ID NO: 442 - protein, 178 aa, Zea mays
MAEAPASPGGGGGSHESGSPRGGGGGGSVREQDRFLPIANISRIMKKAIPANGKIAKDAKETVQECVSEFISFITSEASDKCQREKRKTINGDDLLWAMATLGFEDYIEPLKVYLQKYREMEGDSKLTAKSSDGSIKKDALGHVGASSSAAQGMGQQGAYNQGMGYMQPQYHNGDISN

SEQ ID NO: 443 - DNA, 5618 bp, Zea mays
taaccaaacagggtagggaccctttagttcactaactaaattttagtttttggactaaaggaaccaaatacccacttagcactagaaaacagacataccctttatagaataatttctcatgagaaatcgggatatgaaatccattgacatctctagttaagggcaccggtgacgataactttgaaacaaaaaaataagaagaataagagataatttggaaactctatttttttcgagggatttttatttttctaaaaaagtaactaaattttattagaaaaataaaaatcatttaagaaaatgaggttaatggaaacccatttttccaaaagatttttatttttctaagaaaaattagtttattttcctgtataggaaaacagaaatacccaaaataggttctaaaactagcactatttgcaaactcaaacttaatgggtgtttggtttctagggactaatgtttagtcccttcattttatttctttttagtatataaattgctaaatatagaaactaaaataaagttttagtttttatatttacaattttagaactaaaatataataaaatgtagggactaaacattagtccctacaaaccaaacacgcccttgtaattttccatcggtatgtcctccgtcttcccgaaagccttcattcggctcgctgtcttctttctatcgctcacaaccaacaaccatagcccacaggccgccggcggccgccagccgacgtcctcccatttcgctccccctcctccgctgcggtcgagcaaaagttccggccatccggcaatcccccggcacccggcggttcaaatcgtatctttctgacctgacgcggctacgacgtcgctcctccggtcccttcgatccggtggggtccgtttctttcaagcgcggcctcgctggccgcctcgtggcagtgaccgtcgaaccctctataaatcccgtgccccgagcacccttcctcgatcacacaacccaaagcagccacagcagcctccttcctcctctcactctcgctcgtgctgcgctcgctacctcgcttcgcattccattcgaggagagcggtgagaggggaggaaaggcaagatgttcatcgagagcttccgcgtcgagagcccccacgtgcggtacggcccgacggagatcgagtcggagtaccggtacgacacgacggagctggtacacgagggcaaggacggcgcctcacgctgggtcgtccgccccaagtccgtcaagtacaacttccggaccagaaccgccgtccccaagctcgggtatgtacggatgcagcggccctagcctcactctctgtgaaccctcctcctcccgtgctcagtcaaatcctccgtcgagatcaactggtcggcgttccctcctaaatcctaatgaaaatcttactgctttgcctgaagacgaaccgtcgtaattgttgacagctacgcacacacttgcccatccggatgcgtcaaatcagctcgatttgaaattcgattcgatggtgcccttttccatatttcgatcatccctcgcctactgtgcaatgattacagaaacgtccttttcctctgaactttgtcttaggctttttgtcctgtgcacgtgagctggtatcaatttgttcatgtaagatcaaattccagcagggacgatgagcagcagacagaactcattacactagcaaattgatactaggattactggcaagtgtgcatacggcgcaatctgccatcctggaccccctttgtttaattcctgttcctatgcatgttgcctacgtgcagctcgttgtgtgttatggtgtcaggctgtcagccgcttgtctctgtctgacggatgatgccaacttttctgttctggtggtgcagggtgatgcttgtggggtggggaggcaacaacgggtccacgctgacggctggggtcattgccaacagggagtgagtagtacttaatttgtcctatattgctttccgttgttttcagttattaatggcctaacagagaactgaattttgttgttggttgtttcagggggatctcatgggcgaccaaggacaaggtgcagcaagccaactactacggctccctcacccaggcctccaccatcagagtcggcagctacaacggggaggagatctatgcgccgttcaagagcctccttcccatggtaatctattatagacttgactaatactcttctttttactgaaaccaaacatacataacaaagcatattccgtaaggtgctagttgatgttataaaatgaacctgtctttcaggccagtggtctcaagtaaacggaatgttaatcattgggttgaaaaaacaaaggttctaattttgtgaaaggaatgttaaacttagcataatgaaaaggggaagcattgtaagaaaggtgctgaaacaatcgactcggtctgccatgttgtgatcctacttgcaagtcaaaaggttctgtggttagctcaaaggttccagcatctttggattacactcgtgcagtattgacgatggtgctaactggttgcagattcgcagactcggtgtttgttatcttcttttcatgaccaagtgttgaactggttttcaggtgaacccagacgacattgtgttcggaggctgggacattagcaacatgaacctggccgactccatgaccagggccaaggtgctggatattgacctgcagaagcagctcaggccctacatggagtccatggtgccacttcccggtatctatgatccggacttcatcgcggctaaccagggctctcgcgccaacagtgtcatcaagggcaccaagaaagaacaggtggagcagatcatcaaggatatcaggtatatggatatggatgctaacgtgccttggtgctaaggtgcacccagtgcaacctaaaacaaataaatactactatgaatttggtaaatatacatacatatcagaacatattgtttaaccggtgcacttagaagtctgcatggtatgttggacaatttgacattcgatatacagtgaccgctcacttgcatgaggactccacaaagaactaaaactactgaaagcttaagcaactattcgtagctaatgatgtatttggtggacatggtttgaagatctagattaacgtggttgaagaaatatggttcactagtataagtaatccattacagaagctatggcttatgtagctaatgaaacagggagtttaaggagaagaacaaagtggacaagatagttgtgttgtggactgcaaacactgaaaggtatagcaatgtgtgcgctggtctcaacgacacgatggagaatctactggcatctgtggacaagaacgaggcggaggtatcaccatcaacactatatgccattgcctgtgtcatggagggggtgccgttcatcaatgggagcccccagaacacctttgtgcctggtgcgtggtttggtgtgtttgcaaaagcttcatggtgttgcatttctgttccaaagtttcatggtgttgtatttctgttccaaggcttattatacctgttgcatgttcgtagggctgattgatcttgctataaaaaacaactgcttgattggtggtgacgacttcaagagtggacagaccaagatgaaatctgtcttggtcgatttccttgttggtgctggaataaaggtgggaacctagtatctctcttctattaagatgaagtgtttttttggcaaatgacgttattgcaataactcttctatattttcattttcatgcagcccacctcaatcgtgagctacaaccacttgggaaacaacgatggcatgaacctgtctgcccctcaaacattcaggtccaaggagatctccaagagcaacgtggtggatgacatggtctcgagcaatgccatcctctatgagcccggcgagcatcccgatcatgtcgttgtcatcaaggtctgttagctgatctttcacctcgttaaaagttgacatatgcaaggcagatttacattgaaacttgtcactcttttgttgcagtatgtgccgtacgtgggagacagcaagagggctatggacgagtacacctcagagatcttcatgggcggcaagaacaccatcgtgctgcacaacacctgtgaggactcgctcctcgccgcacctatcatccttgatctggtgctcttggctgagctcagcaccaggatccagctgaaagctgagggagaggtaagagccccccaagtgattaacctgaaagcacgctgcacgctaggtgatatagcacttttaataccttctggtgtctctcttatgcaggacaaattccactccttccacccggtggccaccatcctgagctacctcaccaaggcacccctggtaagccttttctcctgcatcccggcatcactgcactgcgttttgcttcaatccagccactgatcgtctctctcgaaacctgaacaacaggttccccctggcacaccggtggtgaacgctctggccaagcagagggcgatgctggagaacatcatgagggcctgcgttgggctggccccagagaacaacatgatcctggagtacaagtgagccaagtggcgtgccctgcagcgcgaggttagctgctggaagggaactagaaaggcgagattagctgtgggattgtgttgggcttgtcgtgttttcttttgcgttctttcctagtcattgctgttgcgcttttgtatttgtcggacccgtaactaccagggctctgctattagcggcacggagcctgtaattgtattgtatgataatgtgatcgagggtgctacttcccctcggcattcctagtgttggttaaaagtcgttcgacagcaacttatcgacccaccactgacttcaccctatccgccggcaacttgtcgaccccattatctgcttagggctagtttggtgagagaattagaacaactccaagaggtcattgaaaaattatttcccaaaccttgttattgggattgttgcaaaaaaattcactaaaaagatctaaacccacagcagactgctaataagtaattcctattttttttgaaacaatctcatcagcagccaagcgtagagggtcatgcagttattttgctcacgtcgtcgtgtggccatgaatgtggtagctgcaacgtgtggttagtgtctctctagtggtcgagctacgcctcgccccggccttctctaccttcgtcgatgtcgcctgcgtcgtcgggagcgaccgcgagtacccgatgatcatcaagcagctgcacgagattgctcttcggtcgctcaagcctctctcgccaccatcgccatttcccaccatcctccaacagaactgtgtgcgaggcaaattaaacgcgggaaccagctacatgcgcacgctgggtgtattggggaacaaatttgtgcacacaaatacgagggagaaaggacagcagatgagggagaaaggacgcctttaaaggcttattcggttaaaggaggattgaatcgattagagtagattaaatctcctcttcaattttaaataaaaggtgatttaacccatcataataccctccaatctccatgcaagcgaagaaagggtaacagatcactatcagttttttccatttgtttgaa

SEQ ID NO: 444 - protein, 510 aa, Zea mays
MFIESFRVESPHVRYGPTEIESEYRYDTTELVHEGKDGASRWVVRPKSVKYNFRTRTAVPKLGVMLVGWGGNNGSTLTAGVIANREGISWATKDKVQQANYYGSLTQASTIRVGSYNGEEIYAPFKSLLPMVNPDDIVFGGWDISNMNLADSMTRAKVLDIDLQKQLRPYMESMVPLPGIYDPDFIAANQGSRANSVIKGTKKEQVEQIIKDIREFKEKNKVDKIVVLWTANTERYSNVCAGLNDTMENLLASVDKNEAEVSPSTLYAIACVMEGVPFINGSPQNTFVPGLIDLAIKNNCLIGGDDFKSGQTKMKSVLVDFLVGAGIKPTSIVSYNHLGNNDGMNLSAPQTFRSKEISKSNVVDDMVSSNAILYEPGEHPDHVVVIKYVPYVGDSKRAMDEYTSEIFMGGKNTIVLHNTCEDSLLAAPIILDLVLLAELSTRIQLKAEGEDKFHSFHPVATILSYLTKAPLVPPGTPVVNALAKQRAMLENIMRACVGLAPENNMILEYK

SEQ ID NO: 445 - DNA, 6830 bp, Zea mays
cgagctagcccaccgtgcttagtttcctgtcggggtccggcccgcttatttgtgccgggctggtccgggcccgtataaatgcgggctggaccgggctcgtaccagaccaaaaaaacatgcttcagaccgagctttcgtgttttctgtacatctatacttataccctctcaattttaaattataaagcatttttaatttttagggtcaaattatgttgatatagtgtacatctaaatgtatagaaaaatggtgaatctaaaagggtcaaattatcttatagtttggaagggagtaatgttaacatcaattatatttttttggtgtttgcccttaaatactacattcaaaaggaaaatgtggtagctttaaaacaaaatgttccaacttaagattttttcttaaaataaaacaatgttctacttcttgaaggaacacattatagtttcactagcaaaatgatgcagctcatgaccaaaacattccatgctaaaaggaaatttataccaccattatgagtaaactttttccaaattctcgagaaaaacattctacaggcacaagaaaaatgttacatatttaatagaaaagtcttatgacatatttatgtgaaatgaaaagattctaagttagttagagcacaacttttaaaagactgacaaaaaaaaattaccactagggcaatgggaaaaaaagcttcaattgtggataaaaaagaaatgatttttatgaggcaggacttataataataaaattaggtacaagcggaataaaaaccgaaaaaaaacgtgtcatggcaatagaatgaaaaaagaacgagagatacaaaaaagagaagtcgtgcgttcacaccctgtttgccgttttctccctttacacgctcgattccccccgccgtttccacgggggccaggtgcctgcattactgggtccgggcctagcgtcagcgcaaccgaacacgccggcgaccgctgccgcccttctcccagctgcccaggtcttcgtcgggccctttgcctgcggcgtcggcgacgagcgcctgccacaccaggtatgcctgccccttctcttcccttctgtgcaaaatgtgcacctgaaccctaatttaacctatttggctatctgtattcggatcagatctgataaccactaggtatgtttatgtattgtgcctactaatagcttgttttttttggcaaaaactatcgggtctacgtgttgtattggctccgccgaactccatgatgcaaaaactaggcatattacaggcttaaatatgatatcggatgcttctagatttatatactagcaaagaagcaaatgctttaatcatgcctagttcaagctttatttgccacaattcagatattttgccaccgtagtcatctgtactgctatgggcaaaaaataaatgtttgctttcatctcctcttttggaaaaccagcgattatgttgatatttcattgggacatataaatacgagtttttttagtttgtaaaaggtacaagggttatactaacactgtacttgattttcttgtaaaaactttgtttttttggatcaatatataaacgatatactcatctgacaggaatcccgttaagtttatttatgctcaccaatttaagggcagaacttacggacctcaagctcttggttactcctgatcttctctaggcgactaggcacaattgccctctggcaaaatgccatcagtttatctttacatccctaacattatcggtacgcctctggatggttatctattgacattctattttgctgttccaaaacctattatataatatttatattttttttgttacttatatctcaaagtctggataattgtactaatgagtaatgattcgtgcaactggaaacattgcctactttctgtcattgattttgtacttcattctagttatgttgccagtttgctatgcagtgcagaagcaacatccacatactgcgttttagttttgttgccactttgctgcccaagtatagctacataaatggaaccataaatttagtagaggacacatagtttaaccaacgagacaatatgtttatctactgcttttagcatgaatgaaaaacagaagcctatgtgactaaaattccaagaattgtcattatcacacagggtattttaggatcatcataaatttcattgcatttgcggtttgctattccaacaaggctctctttgctatcctgtacttcatcaggtgagcgtcttatatctgcaaacttcttgaggttgccaatgatttatgtatattgttctaacatctttacaaacatgctagctttgtccttgatggtgtggatggttggtttgcaaggaagttcaatcaaggtaataattcacattctccctgttttcaagtcatgtagcctgtcattatgtgaagaaggttaatacccatctttgctataatgaaatttccttgcattgtgtgctggagaccaactttcaaatggttatgtgtaaagattgatctcagctaaatctctttttccttttttccacacagtatataagctatctgttaagttataacattatctgatcagtttatttcattctatgaatcagcatcaacctttggagctgtgttagacatggttacagataggtactccttgaatgaatctttaaactctggatatgcagggtgaatacattatagtattctacagactgaaataattttacagctcacattgtttttcttcagggttagcactgcttgtttgttggcccttctctcccagttttacaggtatcaaaagcagaagagcttgtattgatttgtcttgtatctcaatgtctagtacaaatcctaattgcaagcattgttacagacctggtttagtcttcttgatattgcttggattggatattacgagccactggtttcaaatgtacaggtcagtttcctctaccattttgttcagtttttgcaagttcccagtttgttttctagtcagcacctaatcctgttctttaggtagtcaaggcaacagaattaatctgttagcaattacattttcaataattgcctgatggtttcattatgcatgcgttctattcaagagtttctcactttcaattattttttacttatttattagtccttcaattccaaattataagtcttcgtggcttttctagtacatagttttcaccttgtatctagacacaatatatatctagatatgtagcaaaagttatgtacctaaaagccagaaatggagtacttgctaactatgtaatgccatattttctatactagttctttcttgtcaggtaagactagccacaaggatgtaaaacacacaggcaattggcttctgaaattatattatgggtacaggccattcatggccttctgctgtgtttcttgtgaggtatgtcatcgttcatactgtgtgatatcctcaagattgcgatccttgtgcagtttgaattcattccaatgtactccctccattccaaattataagacgtttagcttttctagatgcatttgcttttactatgtattttagcttttctagatgcattgcttttactatgtatctaggatgcaaaattgtaaatgcgtaacaaaagctatgtatctattaagttaaaacgcgaaagggcctctagctgagttggttaggtggtctgagtagcactcctcaggtcctgggttcgactcctcgtgggagcgaatctcaggctgtggttaaaaaaatcccctcgcctgtcccacgccaaagctcgggtctaaggctcagccccagtcgcggtcgttctcacatggacttcgatgccgctgtgtatgggtggggcaggggttcgggggttttctcgacctatgtgagaaggttttcttcttaatataatactcgggggttgtcttaccccccgcaggtcgagttttaataagttagaacatcttgtaatttggaatgtggggagtagaaaattaggggttgaatgttgtattgtggattgaataatgtctcagcacaatcacatccagcaattttttacacagctagcaaaacatgcctttatagttcaccctctaaactatttctttggactaaacttacaggttttatatattttcctgtttctctttgctgatgaggagtcaacaagcttgcttagtgtaagattgcatcatttctatatattgccattccgagttggcatgcgagttatctagcacttgacatttctgtattattaataaacattttaacaggtatgcaaaggcatcctgaaccaaagtcccgtcgttatcttggtgtttgtttccactctagttggctgggcagtgaagcaagccaccaacgtcatccaggtatcggtgcttgaattttcctgcagcttattgcaattgcaatgtacacatttgcacgcatttaacccgaacctggtcattacaacagtatatctaaatagctgggtttagatctgtatatggtgttagaactgttgctgtgctgcatgttctacatggttctcaaaatgcaatttgatagtggatttagtgagaagtctaagattttgtaaaagggtctttaactgagttggttagttggtctgagtaacactcaggttctgagttcggatcccagtaggagcgaattttagactgaggttaaaaaagatcactcgctggttctcctcgttgtgtgcacatccttgttttaaaggcgtcgcctaggcgtccaggcgcccgaaagatccaaggcgtccccgtcgcctaggtaagaagcagcaagagggcatagggcagaggggaagggaaaggggcggcgctgtttcggggtggcagcgccgaatcgggagcggcggaggccaaatccagggcggcggaggctgaatcgttggcggccgcgtccaaatcgtcggcggcgacggcgaatctgaggcggcggcggctcaatcgggggcagcggcagctgaatggtgggggagagaggcaacctagggttgccagaggaaggattatatgggttgactggtgggctgggcctcctaccccttccttctcctttttttttctttttttctttttcttcctcctccatggggctgttttgctgattctcaggttgataaggcgtcgcctagcgtctaggcggtggtccagcgccttatcttgccttaccgccttaagaaccatggtgcacatgagatggaccgacctattagggtggatcctcgtgtagggtatgagagggctcaaagtacaagtaaagatctagcccatagaggttagaccctcatgatacatcggggcaactttcgtgacctttctcggtcgtggttttgattgaacttcttaatataataccggtggggctgtctttccactaccggctggctgagtttttttagaatccggatatttttgacatccatgtattttctgcgtacagatgaaaactgctgcggacgcatgcgtggtgtatgatctgaagcgcagcaaatgaagcatgaaggcagcttcacggtttagtatcgacatatccaagggaaaactctgcgagggggcgggctacgtcttgcgtgccttgacatctttctgatgatgcggtcatatgtgggaccaggggatgacatgccgtggccaatgcaaacaattgttttgtgaaagcagcggccgttaagttgttgtcagtgtgagagtggtgatgcgatcatgatcctttttacctagagtagctcccctttgtgttagcctgaacgatgttttgcaagccgcatgttccgaactctaggattatttggattacaaaacttacatattccatcctcaaggccagttccctcgagagttcgatagttacttatagtcgctggaataggcactagctactgttcgaatgatttcccttttgctccttaagcatcctttgggtcagctttatcgataaaatttctttttttatgtgacatccctttgcttagaaggggattgaatggaataggagaggattgaggaagaaataaactaatttatctctcaatctcttcgaatccctttctaactaaataaactgctttaaatgataaacaatacctctatcctaaaatataataattcgttttagattaattatataccaatggagtttgtatatatatctatattaattatcatttgaatgtatatgaacagaaaaaatgggctagaagtaactatattttaggagaacggaggaagtaccaagttaacattagtttgaagggatataacgcttttcctgctgtgcagctaagagcctgaggccgacggcaatactgtgttgttcatgtgctgcctgcctcgcgcgctgagaccaactatttatgctatgaggacataaaaccgtcctctctcacacagtgccaatcatcacactcgtggattgtgtggtgacgtgtagacaaatatacgtcaagttgcattctcacaactagggtcagatatcgagctagtatggctcggctcatccgaattcgaactagcttgttaaactaacgagcttgctcggctcattaaactaatgagctatagagtcagttcggtttggctcgactcgtttacgagcttgagctagctcgtttagctcgcgataataatcaatttctatttaatttcaaactaatttaacaataaaaaataataattatactcataatttcacataccacatcaatgtaacaccaaattaacataacttatcacttatcaattcacaaacatgttcatcagtttaactcacaattatatttgcatatatcaatttaacacaaaaataattcattaatca

SEQ ID NO: 446 - protein, 215 aa, Zea mays
MPSVYLYIPNIIGYFRIIINFIAFAVCYSNKALFAILYFISFVLDGVDGWFARKFNQASTFGAVLDMVTDRVSTACLLALLSQFYRPGLAFLILLGLDITSHWFQMYSSFLSGKTSHKDVKHTGNWLLKLYYGYRPFMAFCCVSCEVLYIFLFLFADEESTSLLSVCKGILNQSPVVILVFVSTLVGWAVKQATNVIQMKTAADACVVYDLKRSK

SEQ ID NO: 447 - DNA, 3695 bp, Zea mays
aactcggaactcgtctgggcggtctagactccacgcagcgtatagacgacgtggcccattgtgaggatatgactgcaagtctgcagaagccttgggagtccactcttgagccgcgatccagcacgtcgttcttgagttgagcatgaacgtactgcttcccggagctagttcgcggctgttaaaactatacgttccggtgctagaactataaatctgtgtttttttaaaggaaatgacaatcaaagatagaaattttgtcttagtattaaattaataaggtatttatgagagagagagagagaaaacagagagtaggaaggatagtagatgagggaaaaaaggatattctcatacaggtatggaatcatttgattgccgtgatcccgtcactaatttgtttcccgttttgaagctcagatgtcattgagatctaaggtggaacgtctcttcgtctcttgcaatgggacgtggactttggtccaccgacagggggaatatattatatgtaatatagtaatcaaatgcacaaccccccgggtaaaaagggtttatccattgccttcccctttatcgcattaaatctcgattcgactagtcccagtacgaatatgcaagtaaaaccaggatcccgcgaggaaaacgaaagtaaaagcaagatcaccggattggataattagtttcttaatcaggcgccaattagcgagcggaaattgcgaccataaatataaataaacgaggtggcagggcccgccactacagagagagcgtagagacatgttatctcctcacttctcgggccttcctcctggaattccccaaactgccccaccgagaaacttccgtccacggcgtccgggccgtccgatctgtctacgccgcgacacgtgcgcctcagatggaagagcggccgtgcccagcgaccgacgcaaccggggaccattccgccctccggctatctatttaactcgtcgccaacccagggcggaaaccccaatcgcaagctcaagcaaaaacacaaagcgcttaaaccacactcaaaccaaccgccaacaaacaggcctcctagtcccgaccagaacttgctcgtagccccgcccccgagaacccgacagcgcgagatggctcccgagctgatgacagccaagatgaccgccaaggccgcggcggcggcggcggcggtgaagcctgccacgagggcgtacgtgacgttccttgcgggcgacggcgactactggaagggcgtggtggggctggccaagggcctgcgcaaggtccgctcggcctaccccctggtggtggcggtgctgcccgacgtgcccgagtcccaccgccgcatcctcgtctcgcagggctgcgtcgtccgcgagatcgagcccgtgtacccgcctgagaaccagacgcagttcgccatggcgtactacgtcatcaactactccaagctccgcatctgggaggtacgtacgtactgtgtgtgtgtgtgtgttttttgtttactttttagccttttcttttgcccataattgttctgtagcagtgctcacgtcacgtgtcgattcgtgcagttcgtggagtacgagaggatggtgtacctggacgcggacatccaggtgttcgagaacatcgacggcctgttcgagctcgagaaggggtacttctacgcggtgatggactgcttctgcgagaagacgtggagccacaccccgcagtacaggatcggctactgccagcagtgcccggacaaggtggcgtggccagcggcgaccgccgagctgggccctccgccgtcgctctacttcaacgccggcatgttcgtgcacgagcccagcgtggccaccgccaaggcgctcctcgacaccctccgcgtgactccgcccacccccttcgcagagcaggtgagcggtgtgatccatgcgtggcgtgcgtgcgtgcgtgctcactcttcttaattggcacagcatacagcatgtgtgctcactcatctcgatcgaattcctccccccgcaggacttcctgaacatgttcttcagggatcagtacaggccgatccccaacgtgtacaacctcgtgctggccatgctctggaggcaccccgagaacgtgcagctggagaaggtgaaggtcgtgcactactgcgcggcggggtccaagccgtggaggttcacgggcaaggaggcgaacatggacagggaggacatcaacgccctggtgaacaagtggtgggacatctacaacgacgagacgctggacttgaagggcctgccctcgctctcgcccgacgacgacgacgaggtggaggcggtggccaagaagccgcttcgcgcggccctggcggaggccggcacggtcaagtacgtcaccgcgccctcggccgcgtgatcccgtgctctggccttcccccaccgcgcaccgtaccggtggccgcgcgctatagcttgtgtgtgtgtggccatcgcggaacataagaagaatctctcactataaaggccttcgttctgtgtttgcattttggttttggattagggtgtctaatttttcaccagttccttttccccttgtgtaagtgtggagcttactatatagctagcgcccatttcaaggtgctgcaagcgttggtcaggaattgggctagagtgtttgtcctgtaccgagggattatgtgtatttttgctatttcgctcggtaaattaatacaataataaaaaatagggagccgcaaaattatggccatatttctgtcgggttcggtgtcactcgcattactggtgggtgatgttacactgtctttttcatgtttttttttgtcccccccaggccccagatttctttttggacttccttttccttcggttttaaggtggggctcttggctgttgtcatttctttttccggctcgctcttgagagtacactacagtaccctgacgttcccgcacagtgttcacacattgcgctgcgatgcttctgatttggagggtgacgtgggattggtaagggcgtccggatactggaaaatccaccgggatgcggatgacatggctcaaatcttgcacggatctcaaggctgaggcctggcctcaccgaacaatcaaaatcacgaaaatagagtgctgctgttgtcgatttgtcgtggtctctacgctccaccacaacacttcaacagcgtctggcagcaagcccctcacctctcacgggagagagaaagagagctcccggccggcgcgaccagcggtggtccaaagatctagcagcgacgtacggagaaccttgacgcgaggtatcagcgatcagcgaggcaggtgtggaatcagagacaagtgatcgggaacggtagaatcgggcggaatcagggagcaacgagggtggaaggaagagagagcgatggggacgggtatgtgcctgccgagcggaggaagagatttcctctttattttcacgatgggcatggacgtcagtctcaccttaatgccgagagcggctgtaatactatggtcgtttttttctcggtacgattgacaaaccatagcccatagaaaactgcaagttgatgtttggtttgcggaaatatatgttttgtttgccgaagtataacgcaaacggattatataagataatggatattgataattttatttggttaagctctttttagcagtactaggtactactcactccatttttttatttctcgtggtttaa

SEQ ID NO: 448 - protein, 345 aa, Zea mays
MAPELMTAKMTAKAAAAAAAVKPATRAYVTFLAGDGDYWKGVVGLAKGLRKVRSAYPLVVAVLPDVPESHRRILVSQGCVVREIEPVYPPENQTQFAMAYYVINYSKLRIWEFVEYERMVYLDADIQVFENIDGLFELEKGYFYAVMDCFCEKTWSHTPQYRIGYCQQCPDKVAWPAATAELGPPPSLYFNAGMFVHEPSVATAKALLDTLRVTPPTPFAEQDFLNMFFRDQYRPIPNVYNLVLAMLWRHPENVQLEKVKVVHYCAAGSKPWRFTGKEANMDREDINALVNKWWDIYNDETLDLKGLPSLSPDDDDEVEAVAKKPLRAALAEAGTVKYVTAPSAA

SEQ ID NO: 449 - DNA, 2150 bp, Zea mays
tcttttctaatagatactcgaatgaaaaaattcgataccacagtccttgcaactccccttgtcggatccttatcaaaagctcaattttgtactggatcggggcatcctattagtaaacccgtttggactgatttatcagattgggatattcttgatcgttttggtcggatatgtagaaatatttttcattatcatagtggatcttcgaaaaaacagactttgtatcgactaaaatatatacttcgactttcatgtgctagaactttagctcgtaaacataaaagtacggtacgaacttttatgcaacgattgggttcggtatttttagaagaattttttacggaagaagagcaagttttttctttgatgttcaccaaaacaattcacttttctttccatggatcacacagtgagtgtatttggtatttggatattatccgtatcaatgacctggtgaatcctcttactcttaattaatcattagacaaaattaataaactagaaagatcgatatcaagataaaactgccacattttcccattctgaaatgttcccatagtaggtgaatccactgtaagctaattaagaatcctcgaaaattagtggacttcctcttcggaatagaaaattggctatttccacatagggaaagtcgtgtgcaatgaaaaatgcaagcacgatttggggaggggttttttctattgtaacaaggaagaattatctactccatccgactagttccgggttcgagtcccgggcaacccatatggaaaatagaaaagagcaatctgagtttttcatttttactaacttaatttcccaaatttttggattggtaaatgaagttatacgaaaatccaatcgttggggctggcttggttgacattggtatatagactatgttatactgttaaataacaagccttctattatctattttctttctagttaatacgtgtgcttgggagtccttgcaatttgaataaaccaagatcttaccatgactgcaattttagagagacgcgaaagtacaagcctgtggggtcgcttctgcaactggataactagcaccgaaaaccgtctttacattggatggttcggtgttttgatgatccctaccttattgaccgcaacttccgtatttattatcgccttcatcgctgctcctccagtagatattgatggtattcgtgagcctgtttctggttctttactttatggaaacaatattatctctggtgctattattcctacttctgcggcgatagggttgcatttttacccaatttgggaagctgcatctgttgatgaatggttatacaatggcggtccttatgagctaattgttctacacttcttacttggtgtagcttgttatatgggtcgtgagtgggaacttagtttccgtctgggtatgcgcccttggattgctgttgcatattcagctcctgttgcagctgctactgctgttttcttgatttaccctattggtcaaggaagtttctctgatggtatgcctttaggaatatctggtactttcaactttatgattgtattccaggcagagcacaacatccttatgcatccatttcacatgttaggtgtagctggtgtattcggcggttccctattcagtgctatgcatggttcccttgtaacctctagtttgatcagggaaaccactgaaaatgagtctgctaatgagggttacaaatttggtcaggaagaagagacttataatattgtggctgctcacggttattttggtcgattaatcttccaatatgctagtttcaacaattctcgttctttacacttcttcttggctgcttggcctgtagtagggatctggttcactgctttaggtattagtactatggcattcaacctaaatggtttcaatttcaaccaatctgtagttgatagccaaggtcgcgttattaatacttgggctgatatcatcaaccgtgctaatcttggtatggaggtaatgcacgaacgtaatgctcacaacttccctctagacctagctgctcttgaagttccttaccttaatggataaggtttttctcctaaacatataggaatttttgaaggaaggaaagccggaaatacccaatatcttgttccaacaggatattgggtatttc

SEQ ID NO: 450 - protein, 353 aa, Zea mays
MTAILERRESTSLWGRFCNWITSTENRLYIGWFGVLMIPTLLTATSVFIIAFIAAPPVDIDGIREPVSGSLLYGNNIISGAIIPTSAAIGLHFYPIWEAASVDEWLYNGGPYELIVLHFLLGVACYMGREWELSFRLGMRPWIAVAYSAPVAAATAVFLIYPIGQGSFSDGMPLGISGTFNFMIVFQAEHNILMHPFHMLGVAGVFGGSLFSAMHGSLVTSSLIRETTENESANEGYKFGQEEETYNIVAAHGYFGRLIFQYASFNNSRSLHFFLAAWPVVGIWFTALGISTMAFNLNGFNFNQSVVDSQGRVINTWADIINRANLGMEVMHERNAHNFPLDLAALEVPYLNG

SEQ ID NO: 451 - DNA, 3104 bp, Zea mays
catacccatggaaacattttttgttacatagccgtaccctaataggcgaatttcacatgagttgatgggtatcgggttccaattgacatctctacctgccatcatcgtttcgtaaccgtgaaaaagaaacacacgtacgccacgctttgcgtatacttgtagcacgataatgaaccctctgggtgaaaggaccactcgtcggtcggtccacagaccgcttgctgtacgtggctcgtgaagaatttattttgatgaacaaaatgaaatccaacccacgggaggcatgtgttgtgtactccatgcatgcacccgcgccgaaaaagaaagagattcccttctagcccatgccgtctcggccggtggtgggcccctcccccagagcccaaccccaatccgcatgaaacggagcagcatccccggccatatcccgagcgcgcctgcacggccacagaagaaccacgccgcccgagagcaaccgccgctgcaaaagcgaatccgtcccaattcagctgaggtcggccgtgacgccaaccccgcggtcccgtccaatccaatcctgggccgctgaggtggccatccacgggcctccctccctcccccccaccttccccgaaggcccgaacccaccaggccaccacctcatccagctgcccccgcccaaccacacgtgccaattccgctttcgcgcagccgccgactcgctttgacccccatcccgcatcccctatccccgaggaagcttccagaccgcccgcgcccgccgctatatatccctctcctgcgcgcggttctcagcttcgacaacaccgcgcgcgcaatacacgggacacacacgcagatccgagctaaccaccatcgacgagcgccagccgccagcagccgagccggagcgaccttttcttttttcttttacacagcgggacggagaaaggagtcaatcagccaaagccacccaccgcttttacccaccgatcggcgttgccgccgctagcattgtcggcttcagctccatccaaatccaccgccagcaagcaagcaagcaagccggcgccatgggtctgccgatgaggagggagagggacgcggaggcggagctgaacctgccgccggggttccggttccaccccaccgacgacgagctggtggagcactacctgtgccgcaaggcggcggggcagcgcctccccgtgcccatcatcgccgaggtggacctgtacaggttcgacccctgggacctgccggagcgcgcgctcttcggggcccgcgagtggtacttcttcacgcccagggaccgcaagtaccccaacggctcccgccccaaccgcgccgccggcaacgggtactggaaggccaccggcgccgacaagcccgtcgcgccgcgcggccgcacgctcgggatcaagaaggcgctcgtcttctacgccggcaaggcgccgcgcggggtcaagacggactggatcatgcacgagtacaggctcgccgacgccggccgcgccgccgccgccaagaaggggtcgcttagggtaagcccatctttttgtcggaattgaagacgggtccgttttaatttgatctgcgctggacgaatttagctaatagtctgatcgaattgaatcgtcgtgcagttggatgactgggtgctgtgccggctgtacaacaagaagaacgagtgggagaagatgcagctggggaagaccgccgtcgccggcgtcggcgccaccaaggaggaggcgatggacatggccacctcgcacacgcactcccactcccaatcacactcgcactcgtggggcgagacgcgcacgccagagtcggagatcgtggacaacgacccgttcccggagctggactcgttcccggcgttccaggacccggcgatgatgatgacggtgcccaaggaggagcaggtggacggctgcagcgccaagagcggcaacctgttcgtggacctcagctacgacgacatccagggcatgtacagcggcctcgacatgctgccgccgcccggggaggacttctactcctcgctcttcgcgtctcccagggtcaaggggaaccagcccgccggagccgccgggttgggacagttctgagctgaggcgaggatggagccatggatcaggagatgaagacggttgcgaactctgtaaatacagcataggagtcgaacctgaccctgacccttgttggggttacaaggttttccgagtgtcggtgtagcgtacatggagccggcggcgcggccgggccggctcattctttagtttcacttccaaagcagacgggtagatatatgtgtagctgttcacttaaactctcttcgacagaacaaccgacgaaattttgctcttgtttataagtactacctcgactgtcgcttccctttgtctgtctcttccctaccctgtgttgtatacttgtattggcatgcttgcagcgaccacggggacagcggcgggctcaggcctagatgtgtcaacagagatccgatacccgataattttcgaagattttaatctccatgtacagatctggaagaaattcttctccattggatatgaatatgtgtacgaagattttaatccctgagtacaaatttgggagattcttccgtattggatatataagtatggtatgaaaaaacagaactctgaacctaattgtccacggataatattcacacagtaataaaattaggtgtgtatctttataggaaacaagcctaacaactaaccctaactctctcaaccttttaagctaagcacctatataatatgattatgcttttttattggggataaggacgtattgaagatccaatacccgaatgggtatgtatgtaagatgaattatgtgcctatgatgggtatggatatggggatgatgatacctatagcttcatagggatgattacgaggtgcctaaacccgatggagaattcttcattaatatatctacttaggctatatttacttaggctctctccactttgtactttgtaatacaacgctatgtaaattacgattccgtaggaggtcgctaaggtcatctctggattccgtaggaggtcgctaaggtcatctctagcagagcttatatatagg

SEQ ID NO: 452 - protein, 312 aa, Zea mays
MGLPMRRERDAEAELNLPPGFRFHPTDDELVEHYLCRKAAGQRLPVPIIAEVDLYRFDPWDLPERALFGAREWYFFTPRDRKYPNGSRPNRAAGNGYWKATGADKPVAPRGRTLGIKKALVFYAGKAPRGVKTDWIMHEYRLADAGRAAAAKKGSLRLDDWVLCRLYNKKNEWEKMQLGKTAVAGVGATKEEAMDMATSHTHSHSQSHSHSWGETRTPESEIVDNDPFPELDSFPAFQDPAMMMTVPKEEQVDGCSAKSGNLFVDLSYDDIQGMYSGLDMLPPPGEDFYSSLFASPRVKGNQPAGAAGLGQF

SEQ ID NO: 453 - DNA, 4823 bp, Zea mays
tctgccttggcaaaggttggattccgaaagatgcgattgcaattaccagaatgtgtgaacagtaaaagaatactgttcactatttataggcacaggacacagcctgtgaggaattacaattatacccctcataaaagtttacaacattgactcagacctttatggactaaagggtcattttatctttaagtcggtttgtgataccgaagcttcatgaagaggaaccttcggccatctcatacaaacagcttcagccgagagccacttcttcctagaagaccttcggcgacgaagcatagacccaacaccctctttacattgtacttcccacgtttcaaaatataattcgttttaaactaattatatattcattaaataacataagaatatagtttccatgtatgtctatattcattatcatttgaatgaatatggatagaaaaaaagtgggctagaaacaactgtatttgaaacggatggaggcttttttctgatttttttcctctgtatacatataaatttcgttcacagttcctacgaaattcgtagcgtttcaaacggggcaaatctgaaacactcatattggggcaaagtgagggcccattgattttctttcctcttccacgtagctccgcaactgatctttttacgagtataacgctcttcaaaattaaattgagatatggatgacctgcatttcttttcggaactgtacctgtcatagacgggaaacctaccaccatgtttccatcaatacaccagaggaactgacaccgggtcccgctgacaggtaagccggcagaggccctacatggcagcaacctagcaccaggtgctcttctcccggggtcgaagatatttttgtacgtatgctaacaatctaacatcccaacaaccgacggaggcaagccccccacgtggcgacatatggttggctgctcgtcgcgtgctcggagaccacgacctgtgacttgtgagcgtatccagattatataatctaaaatattattaactaacattctctaagtgttagtttaaaatttgttaatgtttttaactaacatttcctaagtgttagtttaaattttttttggtgctgagctgagacagggacaggcaagcaggaggaaggggatggagtggcgccgttagcgaggcaaggttcagtctactcgttgacgttcgacagatcccagagcaccctcggcggggccgccgccagctgtggcggtagccgtggcatccccaagggtttcggctccgtgaacatggacgagctgctccggagcatctggaccgcagaggagacccaggccaaggcctccgcctctatcgcaggagcgagcgcggggatgccccccacgccgatgcagcggcagggatcgtcgctcacactgccccgcatgctcagcaccaagacggtcgacgaggcgtggagaaatctcgtgcgcgacgaaccgccgcagggggcggacggcggcggacaccagccgccccaccgccagtcaacgctcggggagatgactctggaggagttcttggtcagagctggcgcggtcaaggagaaccccgcttctgctcctccagcgccgccacccatggtgccgccgcggccggtacctgttgcccctaaaagctccgccttttttggggatttaccgggtgccgacgacgacgcagctacggcagcggtagggtttgcaccggtcggcatggtggatctggccctgataccgcccagggcggcaggcatgggaggcagcgccatggctgtgcaaacagcggtgagccagcttgattctgtcgggaagggatacagcgacctgtcgtcgctgacggagccgcaaactttttcgtttgaaagaatgattcgggggagaaggcatggaggcggagtggagaaagtggtggagaggcggcggcggaggatgatcaagaacagggagtccgccgcgaggtcccgagcgcgcaaacaggtcacagccttttgctgaattcatgcatgtcttactgaccaaggcaccaagcaatttgttagtgcttcttgactcatgacattgtgaactttcgcaattcgattataatcagagtcatcgtactcttcctggttactgtgttaccgttcttttaaagcagacaaattttccactttgctgtttcggttaaaaagaatcttattttactgcataggcttatacaatggagttagaagccgaagttcagaaactcagagagcagaatcaggaactggagaggaaacaggtgtcttttctacaattttctctacacacttctagatttgcttcttctttgggatttggtgcattgcctctcgacgagcatttatttttagtcattctgaaatagatagtttcagcatgctccatgttgcctgcatcaattgtattcccctgaatcattcactatctacttcactcctgtatttttcactgcatttccagaatgaaaaaggtgcaccctgtatatttctggatatcaataattgccttgcgccacacttcatggaccatgtttttaagtgaacattaccaaagaaggggcacggcaacagttcgtcagcatataaatagatttgacgtccggatcacatttcgtgtagcttacaatgagactcgttcatccggatcacatttcgcgtagttacagtgatactgcgtccataggctagtgctaaacacttttagggataggcacacatccttgcacctcagactgttctttggatgtgctcatagtactgactactgatcattcatttcttcgtaatgcaggcagaaattatggaaatgcagaacaacgaggtaactgttaattcaaatatactctattaatctcgcgttgtgagttgctagctgagcaaccagtcgctaaattggttgtaggattcagttaggggaatcatacttccagagtttctctctattccacacatctagttcaacttagcttcagatatactgcatcatccttgtacactgctcagcctgtgagttcatcatatcgattatgattgtctgttactcaacaaactatacttttcattattcaaagaaaagaaatcgaattaggtttttaagagagctggctttgatacatgtgtgttagctcaatcccctgagggctccatgagtgtatgcacggctagctcgttattactggggttttttggagttcttcctcttacctcgtttaaaaaaaattactgacagaatctggagcagtttacaaatgtacggcattgcttccagcacatataattttattttttttcataatgacccgcctgtttttgcatttggtaacgatgactgcaaattttggcgacaggtatcagaaatgttgaaggatccattcggacggaagaaacggctgtgcttgcgaagaacgttgacggccccctggtgacgattgcctagaacagcacatgacttgcacttgctacgtacctgcaggggcgtttgggatctgtagataatttctctcctatagtgtagcgatgaacccatgaacatgaacataatctaaatgattgtactgttagctcccttctgccgcttacgtagtactggagtaccgtattggtggagtcgaaaactgacatgtaaattatgtacgtagtagagaacaaaatggagtgaagccggtcgcaagagttgtggcttcagtcatcctccagagcttgtgcagagttgcctaggttttgcatcttgctggcacatccagactccagagcttgtgcagagttgtctaggttttgccatcttccagagcttgtgcagagaatgaatgattttaaaagatccatgactgggtatggattgatgggcaacaaacatggcagggttcaggaaatgattcaccgttaaaacaaccttctcctagcatgtcttagaaaaacatgcgatatccactataacattaactagatcgttaatagtgtagttcttccttttggcaatcccatgcgatgggacaaggggaagagttctttcatgtatgactatattttcggcatgaaagtaggagaaattatttgagaaatacttagcaccatatgaccttaactttttaatcctcatgtctaattgattctcgacctcagccttatagattctaaagtaatctaatccaatatatttattttttggtaagtacacataacaatatctagttacattatcgatagaagtcatcatgtacttctttcctcctttagtaaatacaccattcattttacaaagattagaatgtacgggttctaaaagtgttaaaccttttcctccacaccaaagtgaggttttcttggttacttagtttgcacacaaacttgatgcttcgaacctttgaccataggcagtttaagaattaaacataaggcagatagtcaagagatgtttaaaaaattatttgtaatcacattttattttctatacggagtatctgttatttaatatatcgaattaataagtcaattttataattatttttattaatttatttaaaatacattttaattaatttattttttgttacacttagatatttttttaatctcattttagtttaaatttgtcgcggctctttaataatgtatcgaatttggataaacaacaaaaagtatggtctaagcacggtcgcgtgattaataagaaattttcagcttgttcgctgcggcttgctgcggctgcaatccggctgcggctgcggcttctacagtatttttctctctatggattgcagctgcagcaatccaaacagctgcaacagtgtcggcttgtagccagccgaacacgccctttgta

SEQ ID NO: 454 - protein, 295 aa, Zea mays
MDELLRSIWTAEETQAKASASIAGASAGMPPTPMQRQGSSLTLPRMLSTKTVDEAWRNLVRDEPPQGADGGGHQPPHRQSTLGEMTLEEFLVRAGAVKENPASAPPAPPPMVPPRPVPVAPKSSAFFGDLPGADDDAATAAVGFAPVGMVDLALIPPRAAGMGGSAMAVQTAVSQLDSVGKGYSDLSSLTEPQTFSFERMIRGRRHGGGVEKVVERRRRRMIKNRESAARSRARKQAYTMELEAEVQKLREQNQELERKQAEIMEMQNNEVSEMLKDPFGRKKRLCLRRTLTAPW

SEQ ID NO: 455 - DNA, 4402 bp, Zea mays
gaaatcgaaacaagtgaagtgcgtccagtgcgccatgaccgaaaaaacctcgtcaccgatcacacgctcgagcaatccaaaaaacaaaacaaaaaaaaaaaggcactgaacgggaggacacgcttctagcatcactacgtttttttcctcgtcatcatcgtctgtttcttcttccgggtggttcgtgatcacgcgcttttctttttaacaactagtactaagaatctaagataagggaacaaaacatgaccaacgcaaaaaccggggggggggggggggggggggcaagaattcgcaacgacacgactacacgaggccaggccaatggagcgtccaagctactgtaggagtcccagctttcgcggcgcgtcgttttcgttaggccgtagggggacggatttcgggatttgaaaacctgggcatattctgcgtccagaggattcgctggggatttggggggaggttagaatatgcggccgggtgcttgctagtactgaacaaaaaacaaagggcaccgaaagccgcggtcgcctttctcgcaccggcgccgggttgagatgagaacgactcgggtcgctgttctgcggaaatgggggcgcaggatatcgtgtggttgctggaaaaaaaacatgtgctgggctcgacgatatttttacccctcgacgacctcgaaggatgctgctatagctcctcttggccatagaacaggagcaggagtgcatgcagagctcctgcgccggccggcgagcatgaggaactgaggatggatggtaggcatatgtgaggaacatgtgttcggttcggtgacggtgacgccagccccggcccttgcctgtctgcctacgcaggagcctacctgcttcatccggctctggttcgtccatctgttcaacctggcttcatgggcgcgtgacctgagcttaaccaccgcctcgtttccgcggtagggtttactagctggtgtccgttgctcggctagcaccgtagcacgcacgtatctccagcacacggtgacaaaaaggaaagctgcagcgagcattttcaggcaacagtggtaactattagtagtattattctctcatgcgatcaacatacatagtggctgtatggatggttaaccatggttgcctcttgaccgcactaccggcgtggcgtgacctaacctaacccgagctccctccctttcgcccccctgtctccctcgcccacgcacgccctttattaaggcacagaggacagcacacagtattgtgggaactgcatgctgagagcaaacccagaaaggaaaaaggaaaaaaagaaaacagagagaggggagagtgggagacggtcggagacagaggcctcactcctccacactctcagtcgtcttccagtcccagcgctttcttggatcgcgaggaaaccactcggggagtttgcagttgcagagaactgtatcggccgaagtggttgcacggtgtgttggccttggccatgcgccacggcagggaacagagacgagcagcagggaggcagcaatggaggcgctcattgaccctgctctcgctgtaaagatagtcccgcggtgccctccgaattccacttgatccaactctcgacatgaagcggccacgcggcgctactccctccctgtctgcgatgcccaatcatcaggaaggtaacttccagcctcatctgttttattcccctttgcaggaatccattgttctggccttctctgggggtgggtgatgtcgtggcgggaatgcgtgcggaatgaagatctgagtccttgtgcgtgcgtgttcccagatgacggctacggcgtgctcgggatggaggcggacgtggacgtggacgtggacgaggagatgatggcgttcggcggcggcggcggcggggagaagaagcggcgcctgagcgccgagcaggtgcgcgcgctggagcggagcttcgaggtggagaacaagctggagccggagcgcaaggcgcggctggcgcgcgacctcggcctgcagccccgccaggtcgccgtctggttccagaaccgccgcgcccgctggaagaccaagcagctggagcgcgactacgccgcgctgcgccgctcctacgacgcgcttcggctcgaccacgacgcgctccgccgcgacaaggacgccctcctcgccgaggtagtattgtcgataactccatactatatatgccgtcgtatcgtataggctgctgggcgagtacggttaaggcgttctatcgtttcttcgcgtgcgcaacggctgatcctagttccgttggctgtgtgaatcgtcgcagatcagggagctcaaggcgaagctgggggacgacgaggacgcagcggcgagcttcacgtcggtcaaggcggagccggcggcctcggacgggccggcccccgcgggggtggggtcgtccgagatcagtgactccagcgcggtgctgaacgacgcggacccgcccgtggcggaggcgccggcgccggcgcccgaggtgcagggcacccttcttgtcgcgccggctggccccgttgccggcgcagcggcggcgaaccatggcggggtgttcttccacgggagtttcctgaaggtggaggaggacgagacgggccttttagacgacgacgggccgtgcggcgggttcttcgccgtggagcagccgccggcgatggcgtggtggaacgagcccgcggaacactggaactgaaccgaggtggacgcggcagtgcagcgtagtagaatcgggatctcggacgagcggtggaggaataaccgaatagaggaattcggagcgataaagaaggggcttttctgcaaattttgtaaaacggggttttacctagccctactttttgtcaattctcgagcgtattagcagtagacagtagtagtagtctgggtcggaacccagtcaagctcagcgcctgggttgcgtttggactccagtgcagaattgcgtagaggatttagaggaagagcggagctgagctgagcgaggcaggagtaaaggacaacctgtatgtcactgttagtgggcccagtgccacgtgaaagtcaggcactgttggtgcccattgacggccggacttgccagcgacgcggatgggcgacgtgaacgtgtctggccgagcagtgcgctcgctccctccccccaatgggccatggcctcttccgcgaaagcgtgctcccctgtaagtatctgatttggatgctagccaaggctgctggatgattacttcgattatctaaaaaatctgatttggatgctcgccgctagatcgttggctcgctgcggagggaatcggcagcggtgccgtcagattgtggaatgtgttcaacggttatctgttggattaatgtgggcttggcccaaattaatattcaataatagtcaatgctaatggcccactttaatgctatggtgtactaattatttagtaccatattggaagttcaaaggacaaatcaatcaacttaaataggtggaccattggtgcatctattgagaagttgagaaaaggatgaaggactgccacacgcgcgcgcgcgcgccgccgccgccgtcggccgggccgggccgtggccgtggccgtggccgaccgtcataataaccgtctgtttcctgtcttatggctagtaacggacgtcagttactggcgtcagtttccagctctaatgcgcgaccgtttctgtccgttgtccttctcccttcttctgaccgcctataagaatggagatggagggctcttccagttaggcgaatcatctcacgcgaattgcaaacaacacattcccgtcccatcttctgcgagcacagagagagtgggagagcaggcctccgaaatcaccgaccgtagagatacacttgcacgggtgtgcgggcgatcagatttttggggagcgtcttcgcgactgctcgcgtgatcgtccactgccttgctgttcgtcgccttcccaagttgacgcgtgctgctgttcttcttcccggcgaccgttcgagggactgcactgcgtacatcttcctgcaccgacttcgtacggctacatcgaacaaacacacgagatgtctcgtgtgaatggagccactggtgccttgagcatcggtccctccgctgggtacactctgttcttcgtatttatgcatgtttcattgctgtttactgcttatgcgagtagttatacacacatgcatatacatgtcattacatatatcgcactgattatctggattaaattaaaactaaaaatgcctaactttctaacagtccaaaaatctgatattaggcatttttctgttagtggttttgctgctgcgttaaaaccaagtgaaccttttgatgggacgttttacaagagatggcgtagtaagatgatactgtggttgaccgcaatgaactgctatcacgccgcac

SEQ ID NO: 456 - protein, 273 aa, Zea mays
MKRPRGATPSLSAMPNHQEDDGYGVLGMEADVDVDVDEEMMAFGGGGGGEKKRRLSAEQVRALERSFEVENKLEPERKARLARDLGLQPRQVAVWFQNRRARWKTKQLERDYAALRRSYDALRLDHDALRRDKDALLAEIRELKAKLGDDEDAAASFTSVKAEPAASDGPAPAGVGSSEISDSSAVLNDADPPVAEAPAPAPEVQGTLLVAPAGPVAGAAAANHGGVFFHGSFLKVEEDETGLLDDDGPCGGFFAVEQPPAMAWWNEPAEHWN

SEQ ID NO: 457 - DNA, 4075 bp, Zea mays
ttttacaatgtttattgaaagtttattacgaaggttcaacttcgtaataatactctcttcaaccttcgtccaagacccattatcctcaaaggaataatgcttcacggacgaaggacagtatcatttaacattttatgttgccttgttcttaattcatagcatttgagaacaagtccccaacaaaagtgtatttcaccaacggttccaaaataatcactagtggaaatgttgatttccattgggccctagtaccggcggtgctaaaaaacgataatgtaaatcggtttagaaccaccactttagagctttctgtactattgaaaatctgtagaatagtaaatatagtatcacgaaattgtagattgaatatcaggcaaaatctgaacggtgttgttgctatgtactcctcacatggcgacggacagtgacatcctatagggctagcgtatgctgtggtccgctccgtacgtggacgtgttgggggaggtggctgcacgttttcggttttcttgtctacttcgtacgtgatccctagctaccacaataaaggtggagcatatatattttcttggtttttagggttaattgtggtcggccgagtaccacctgtcccagatgatattacatgctgcgaattcacctatatatatatatatatatatatatatatatatatatatatattatatatatatatatatatatatatatatatatatatatatatatatatatatatatatatatatatatatatatatatatatatatatataagaaggaacacgtatggtagatgattccagatgcttaccatgcatgttatcatagagttaaaatgtctgtgtcgcgtaacatttctgaaaataatttcggaagatgaagataatgtttctgttacgtaattttccgtcccttgttgttcacatgtgcgtacccacgtgtcagagtgagagatgtaccagtataaagaagcgcagagcccccaagagccggagctgccatgaggcccgaacagttgaagctactagcgtgtagctagggaagagaagcgcgcgagtagctagcagacgtacgtaggcagaagcctagctgggtttgaagggccccgatcgatgatcccctacgcgactgcggcggaggcggagggagcactggggcgcaccatgacgtgggctgagacagcatggtacgagtactcggcggtgatgccagattcctggctgcactgccacaccacatttatcctgttcgtcatctacagcatcgccccgctgcccctgctactcctagagcagttcgctccgtccgtcgtgctgccgtacaagctgcagccccgggtacggctgcccccggcagcctccctcagctgctacatggacgcggcctgcatctttccgctcgccgttggccttcagttcgtctcctatcctgcggtcgccaaggtcttgtcttgtgtattttaatatcatgcatgcatgcatgtgcatcaatattatcactagcaaagaaagaaagcatgccgttgatgacgtacgatgcctatatttaccagatactaaggacccgaatgggactgccgttgccgtcggtgagggagaccatcgcgcagctagtcgtatactctctagtggaggattacctcagctactggatgcaccgtctgctgcacacccagtggtgctacgagaagatccaccgcgtccaccacgagttcacggctcctacaggcttcgccatgtcgtacagccactgggccgagaacgtcgtcctttctatcccggccttggccggcccagtgctcgtgccatgccatgtcaccacgcagtggctatggttctccatccgcctaattgagggcattaacacgcacagcgggtgatcatcattacatgctctgcacagttccaacgacgtaaacacaacaagagtgcatccaattaattaatatattcatcttgttgaaatttgcagttaccatttcccgttcagcccttgcaggctgattccattctacggaggggctgcataccatgactaccatcactatgcaggaggccgtagccaaagcaactttgcacccctgttcacctactgtgattatttatataggacagacaaagtaagtacatgcttgcttagcttaattatatactgtgttaacacatatactctctatattcttttttatttgtcgtgtttcagtaaaaaatgaactaaatattcggagatagtaataatttatatagggcagacaaagtaagttctacaaacctcggacaacaacctgtatttaattttaacatgcaataaatatgccacaacagcacaaactagctagctagaggcgaaatagacatgtcggggctcacatttgtgatccgttggttttcgccatacatgcgccaggtgtccgtgacataaagctgccaaataagaaagagatagcgatgtgttaccaaatgaaacaaggagacacatgataaagtaataatattatatgcatatgagaatttcgttctgagaaataaatgtacatttatatggtttgtcatgtaaatccacgaataggatttattatatgtacgtatatttgccaatccttagcccacaatgactatatacatacttgcctttttcagggctacagataccacaagctaaagcaagagaaggtatcagcgtatctttacatatttgccttttatataaatgtttttgttctcttctgattgatttataatcactacggcacagctgaagagtctagcagaaaatagtgcggataaaggaggcaactactcattcgacgaagggaaaaagaacagatatttttgtgcctgagcgtacgaagaataatcaaggctattacttcgtcctgttcgaagggaagatttgcaaataaataattcgaatttactgcagaagctcttgattggtcgacgaacaaatatattgttgcaatccgtttcgtgtattctatatatctaatatgaaacttttttgtcggaatatatggatcatcccgatacattactttataagtaatgaataccacataagtttttgttggaagatggtctatttaagcttatttgtggctggctcaattcattttaaaaactcaaagggtaagcacacatgacatggttgccacattgcttatctagggtagatgacaaccaacacataaaaatggggtgtgcatgatccttcacatgtaaaaaacaagtcttatggagaccgcactagacacaccacgcttgtttctctatgttattaccgcgtgactgtgccacctagcttgacctgtctgatgggctttgccacctggcatgacctgttagatgaatcactctgcacactgattgactcccttaaattgattcatgaatcattttgctagaggtggctgtcgtgcctctaagtgctagaggctgccaatttccaagcgttccacctagcttgaactatctgatcggctctgctacctcatggattgacctgtttgatgaatcactctgcacactaatcggctcccttgagctgaacgtcctcttttctgagtcacctaaaacaggtacataaatgtgcgttgaaagcgatcggaaagggatcattgttactagatcgatgcatgtcgtccgcacatccaaaggatcctcctcttttctgagtcacctaaagaaagtaaataaacatgcattgaaagcaaccgaaaaaggatcatttttcctagattaacacatgtcatgcacaagtctaaagaaccgtcctcttttctaagtcacctaaaacaggtaataaatgtgcatgaaagtgacaaaaaggatcattgttcttataccgatgcatgccatgcacacgtccaaaggactatcctcttttcttactcacctaaaacaagtaaataaacgtgcattgaaaacgaccaaaaagggatcattcgtcttaaatggacgcatgtcatgcatatgtccaaatgactgcccatgctatatgtcaaatccaaggccatataatataaatggtaatcatagaaacattctagatccaatctatagaatatatcata

SEQ ID NO: 458 - protein, 306 aa, Zea mays
MIPYATAAEAEGALGRTMTWAETAWYEYSAVMPDSWLHCHTTFILFVIYSIAPLPLLLLEQFAPSVVLPYKLQPRVRLPPAASLSCYMDAACIFPLAVGLQFVSYPAVAKILRTRMGLPLPSVRETIAQLVVYSLVEDYLSYWMHRLLHTQWCYEKIHRVHHEFTAPTGFAMSYSHWAENVVLSIPALAGPVLVPCHVTTQWLWFSIRLIEGINTHSGYHFPFSPCRLIPFYGGAAYHDYHHYAGGRSQSNFAPLFTYCDYLYRTDKGYRYHKLKQEKLKSLAENSADKGGNYSFDEGKKNRYFCA

SEQ ID NO: 459 - DNA, 3776 bp, Zea mays
acacacgttagtcatataatattacgttgtcattaatctctatcgatatttttcacccattacgttgtcactagatgctttcacccatttcgatttcagacgatgtcttcggacgttgcgggccatgtgtccaaacgtggttaagtgtggtcgggaaatacccgatcgaggttgagttcggccttcgctccgacacccagccgtgtcattactgtcatatatattgtagcaatgtcaaaaaaaatcaaaacattgagtatgacgtatagggcacatatgtcattaaacttattcagtgtaatgatatattatcatcacgggacttttttttaatgtatgtattagattacctctgccatgcactatacaaacagctacgccgcagtcgcaagcaaacaggctctaaaaggcttcagtcggagaaggatatgagagcggtgagtaccaaacgggtatcttccccttccaaatgatataagcctacttgtttgaccccagcccgcaggcagtcatctgctataataggctaatacaacttgtgtactctagtctgctctcgccgcgttgtccgcatgctgaacccgcgatgttaacacctccctgaacgagtcctctgttcctcaactgaaattcagcaataaaaggaaaaatccgcggtccctgtccctgtccagcaccgcactctcgcacttgtgctgcaggcttctgagctcggcacctgctgctagctgctgctatatatagacgcgttttggggtcaccaaaaccaccagctgatcaacagctagcttcattcctctgcctctctctccctccttcgccaactggccatctctgttgtctctcgctagctagctcgctcgctcgctcgccagtcaccacacacacacacacacactgtgtgtctgtgcctgacgccgccccccagtttcaaacgaacgacccagccagaaacgcgcgcgcgccaaagctacgtgagtgacgtggcagcatggtgagcatgatcgccgacgagaagccgcagccgcagctgctgtccaagaaggccgcctgcaacagccacggccaggactcgtcctacttcctggggtgggaggagtatgagaaaaacccatacgaccccgtcgccaaccccggcggcatcatccagatgggcctcgccgagaaccagctgtccttcgacctgctggaggcgtggctggaggccaacccggacgcgctcggcctccgccggggaggcgcctctgtattccgcgagctcgcgctcttccaggactaccacggcatgccggccttcaagaatgtgagtgcctgctagcttactcattcccaggcaggcaggcagccagccacggcatgccgaaccagtctgacctctctcgcgcacatgaatgcgtgattcccgcaggcattggcgaggttcatgtcggagcaacgtgggtaccgggtgaccttcgaccccagcaacatcgtgctcaccgccggagccacctcggccaacgaggccctcatgttctgcctcgccgaccacggagacgcctttctcatccccacgccatactacccagggtatgtgtgtgtgttgccttgtacttactcgtcgccgcaagtacttgcagtagggaacgtgcaagtggcggcggggcggcgtctgggtgtcgccgcgatgcacgttactgctattaaagtagtagtagtacactaatagctaggcccaccacagcacacgatgacatgacgaacgatggatgggaacggctgctgactgggcctgcttgctcttgtctgcaggttcgaccgtgacctcaagtggcgcaccggcgcggagatcgtccccgtgcactgcacgagcggcaacggcttccggctgacgcgcgccgcgctggacgacgcgtaccggcgcgcgcagaagctgcggctgcgcgtcaagggcgtgctcatcaccaacccttccaacccgctgggcaccacgtcgccgcgcgccgacctggagatgctggtggacttcgtggccgccaagggcatccacctggtgagcgacgagatatactcgggcacggtcttcgcggacccgggcttcgtgagcgtcctcgaggtggtggccgcgcgcgccgccacggacgacggcgtcgtcggcgttgggccgctgtcggaccgcgtgcacgtggtgtacagcctgtccaaggacctgggcctcccggggttccgcgtgggcgccatctactcgtccaacgccggcgtggtctccgcggccaccaagatgtcgagcttcggcctggtgtcgtcccagacgcagcacctcctggcgtcgctcctgggcgacagggacttcacgcggaggtacatcgcggagaacacgcggcggatcagggagcggcgcgagcagctggcggagggcctggcggccgtgggcatcgagtgcctggagagcaacgcggggctcttctgctgggtcaacatgcggcgcctgatgcggagccggtcgttcgagggcgagatggagctgtggaagaaggtggtcttcgaggtggggctcaacatctccccgggctcctcctgccactgccgggagcccggctggttccgcgtctgcttcgccaacatgtccgccaagacgctcgacgtcgcgctccagcgcctgggcgccttcgcggaggccgccaccgcggggcgccgcgtgcttgcccccgccaggagcatcagcctcccggtccgcttcagctgggctaaccgcctcaccccgggctccgccgccgaccggaaggccgagcggtagccggtccccgtccgcgccgaccgcacgtgctcagctcagcagcttcacagctcaccaccagtcaccaccaccaccaccaccaccacctggggtggaggcgtggagcaagcaatgttcatagaaaccacggtcacgtactatacaatactactaccgtaccacaccacacggcagcatcattagcagtaggagattagtagtaatcattaattccttattgggttcttgtaatttcgtatataccacgccgccatttttccttggggccaggccagccgataggtgcccgagggccactgcactgcactgctgtattaggtaggagcaggagtggtgggtagcgaatccaccttccagcagcaggcatcacatttgtgtatttttcgactgggtctcccggttgttttgggtcactctgtatcattgttacgacgattgtattactgctcggtaaataaatttcacatctgaaaacgttataaagtggactctcacgccctctggacgcttctgtagcctttgctacttgggagttcgccggaccggtcggcagtcggcacttgcggcagccggcaggcatcgcgtcgccatcacgtgacaaaaaaaagtcaaacccgccggaaccccatcgtttttcaacgctctgggacgccgataacaagcctctaggcttcatgtgacataaacgtacttactgtattgctcggttttaggcctaagacgtagatttaccagtacacccacatataaacgaaacttcttgtcttacagaacttttattgaacagtaagatataagggttagatacattttattatacctatttatgtcttagctatatcttctattaaaaaaaaaccgcactacagtgtcgctacggggacttgctgaaaccatgtgtgtttggttgtaatgacagaacgagatgtaatatgacaatctcttaaataaaattgtttggttcagggtcagggttggacaggactatcacagtgttatc

SEQ ID NO: 460 - protein, 482 aa, Zea mays
MIADEKPQPQLLSKKAACNSHGQDSSYFLGWEEYEKNPYDPVANPGGIIQMGLAENQLSFDLLEAWLEANPDALGLRRGGASVFRELALFQDYHGMPAFKNALARFMSEQRGYRVTFDPSNIVLTAGATSANEALMFCLADHGDAFLIPTPYYPGFDRDLKWRTGAEIVPVHCTSGNGFRLTRAALDDAYRRAQKLRLRVKGVLITNPSNPLGTTSPRADLEMLVDFVAAKGIHLVSDEIYSGTVFADPGFVSVLEVVAARAATDDGVVGVGPLSDRVHVVYSLSKDLGLPGFRVGAIYSSNAGVVSAATKMSSFGLVSSQTQHLLASLLGDRDFTRRYIAENTRRIRERREQLAEGLAAVGIECLESNAGLFCWVNMRRLMRSRSFEGEMELWKKVVFEVGLNISPGSSCHCREPGWFRVCFANMSAKTLDVALQRLGAFAEAATAGRRVLAPARSISLPVRFSWANRLTPGSAADRKAER

SEQ ID NO: 461 - DNA, 2667 bp, Zea mays
ttgcactgtttgtacagtgaagttttaaataaagagtaagataggaagtgagataaagagtattctggagatagtcttatacatcaccgtagcaacgcatgaatatatacctagttaatattatatgatttaaattttatcttaaaatacttgacgctctatgagtttagtagtttataatacatatttatcttcttctaatacatgaacatcctttttagaatacgtcataggacgatcaccggtacggaggatctaggcaaacaacataagaatcgagcgagtgctaagagcatctctaaaagactaataaaatagctcgtaaagttaaattttagataatcaagagtaaaataactattcaacagactcgctatttggctcatcaatatacttttcaaattgactctctcactatttaaacttggctagccactatgactaactaaactagatagatattttggtggaggaagatgctatatatagagtgtaatatttataaaatgataaatataaagctaaaaataaagagttacttctctaagcacggctggatttcaggcctctagtcctctactagtactagctacacgacgtgcacgcacgcatcacagcatcaacaactagacacgcacacgctgcacgcggccggggaacccactgattcccccttccccgcgcgcggtttgatttcctttcctggtacggatccatatcatagtacatagatccagtagaatagaaggtgatccgaccgccggcgcttgcgttgtttttcccggtccattgaacctgccaaccctcctaaccacaggcacgccaaaccgcgggctccggccaccacccccaccaccaccgccacctgccctgccgcacctctccaaccccaaatccagggggggcaccatgcgtgcatcgatccatcgctggcgcgcgggtccggcggggcggtctgtgagggcaaatttatataggtctagtgggtacccggctacggatagatatgatgctgcactgcacatttgctatatctgaggctcctgcgcgcgccttggcccttggccaggtgtctgtcatgcgggcgatgccgcaggaagaagaagccgcggtggcgacgacgaccatggccgggggcaaggtggcggcgctgctggccacggcggccgcgctgctgctgctgctcccgctggcgctgccgccgctgccgccgccgcccacgcagctgttgttcgtccccgtggtcttgctgctcctcgtggcgtccctcgcgttctgccccgccgcgacctcctcgccgtcgccgatgcatgccgccgaccacgggtcgttcgggaccactggatcaccgcacctatgttgacgctgacgatgagaggtctcgtcgatcgacggtcggcttgcaatggcgcgtcggaatcaagcagttcgcagttcgcacacgcatgcatatgcctgacgacgatgccatggatcggagcgaggaaaaaaaatgtacagtacagggtaaacttgctagtagagtaattggattgcttaggcgcttatagcttagctgcggccttgtagcgtgagtgtgcgtaacagtgctctggttctttctttccattctcatcagctgattgatcagctgacgtacatcatgatttactcatccggttccctcctcctccttcgaattctcatcatccggtgattcatggcgaaaggggctctacctgtgttgttagatagtctaagtagcactcgtcactgggtttgactccccatgagatcaaattttagtttatggttaaaaaaatctcttcgtttgtcccatgccaaaacacgggtctaaggctctgcctcagtcgcggtcgttctcacatggttttttatgtcgctgtgtatgggtggaccagatgcttagggcttgttcggttctaccccaatccatatggattgagggggattgagggggttttaatccatagtaagtcaaaatcccctccaatccgtatcaatcccccaatctatatggattgaaaataaccgaacaagcccttaggggttttctcgacctatgtgagaagatcttcttaatataatactcgagggttgtcttacccccgcaggtcgagttttttttatccagtgattcatgcagcttgtcgtcgattcttttcctcacccataccatcggatcacattgtgttttgggggaatttcctgatttatattccacaagatgtgtgggctgtgtttcgccttaaactcaagcatacggtgcggccttgcacaacctatttaactagggtccgggtccgttgaagcctaatgaatagatggttgtaaatactttttttccctgtgactaaacatttttaacgagacagtcatagaatagctcagttttatattggtcacatatgttttgtacttttatttatgttttatttcatgtgatttacattatgacattttggactactctggcacacttaagtatttgtggggcgtgtcgtggaccgatgcctccgcccgcagattgacacaacacgacctataattagagttgtgctttagtgggtcgtgccttggtgggtcgtactttaatatatctggccgtgtcggaccgaaccgacctagatgtacatgtatcggtgccgtgaggcaaccccttgtctt

SEQ ID NO: 462 - protein, 118 aa, Zea mays
MMLHCTFAISEAPARALALGQVSVMRAMPQEEEAAVATTTMAGGKVAALLATAAALLLLLPLALPPLPPPPTQLLFVPVVLLLLVASLAFCPAATSSPSPMHAADHGSFGTTGSPHLC

SEQ ID NO: 463 - DNA, 5405 bp, Zea mays
ccagtccaaccgcccacctccatgagagttatgtatttagtgtttcgaacacaaaacttatgttgaatacttgtcagagcgtgtaaacttgtgttgatacttctgaacttctgttaatactgtttgtgttgagaacctctcaacttatgttgaatacttatgtcagaatttgtgttaatactgtttgtgttggctatatatgtctgtgatgtatatatgtgatatctatgaaatatcttttgtttgtttggatggaatagggaaaacaaataaaaaaggtgtgtactggtcttgacgagtgtaacactcggcaaagcacctctttgccgagtgtcagaaccataacactcggcaaagaaccaagacctgggcaccggtataggttctttgccaagtgtaatggctctggcactcggcaaagaagcacgctttgccgagtgccacaccaagcactcggcaaagtacctgacatggggaacccctccggcggattctttgccgagtgttgtcaggcagtcactcggcaaagacgccgtcttcgtcacccggcgccgtaacgtctgcttttctttgccgagtgttctctggcactcggcaaatcactttgtcgagtgcccgagaaaattttttcggcaaagaagactttgccgatgcactgtgtgccgagccctctttgccgagtgcgacactcggtaaaacctttgacgagtgtttttaaggctttgccgagtgtttcagacactcggcaaagccgtcggttctgatagtaattgttaattcgcatgcccatagacggctcggtttctgtaccagcaagtacatgcacacttggggggttggggtgcagttgctttgcgcaggctgtcaaggtgcgcagcagggaaggaagaaagaagccatccaatcatttagatctcgctgtgcaagtactagtactacggagcagtagtagtaacaagcttgtggttgtgggatcagccaactgcgcaacgaaaaataattgccactgtatgcccaactcaactcctagctaggagaggaagaagagtacaaggaagagactgtggcaagcacagcacagtggatacacacctagcttggccggtacagagcaccgtgcttgcttgtccatttccgtcacagctagcgcttgcccaggtcccccaccttatcaacaacaactgtgcccctcctgcccccgctcgccgcgagagctcccgtcccgacgaccttccctcctgtagcactctacagtctacaccaagcagcagcgtctcctgttgcatgttgcactgcacctatctacgacgtccgttcccagtgctttgctcaccgacaccgtatcttatgagcaaggagccctgctgctcccatcaccttcatcaagccaagcgtgtgtcctctgtcctctcccagctgcgagctccgacccccggcaccatgtgagcggttccttctcattcaagctcaaccttgtctccgggttcttgcttgcttgcttgcttgctaacaccgctgcctagcaggtccgacagcagcgacttcgccgagctgctatgggagaacggccaggcggtggtgcacgcgcggacgaggaaacacccgccccagcaggccgccttcccgcccttcaccttcacctgcagcagcagagctcaacaaaggcagccggtgccgccgctgctcaagacgggaggaggtctctttgccgacttctcctcggccaccgccggcctagacgccccccgtgacaacgccgacctcgacgacaccgtgccgtggatccactaccccatccccatcgtcgacgaagccagtcccgccgcgcctgccctggcagatagcttcatcccagatttcttctcggagctgcatgcggcggcggcgacgacgagcctcggccctctgccaccaccaccaccaccaccaccagcagtccagcacaccggcgacgacaacgacaaccggagcaccccggttcccaatcccaccaccggcagaggaccagagccctcaaaggaaacccaccgcgcaccagtaccaggtccagccggcaggcctgagccacaaccacaagctgagctcgcgcccgccaggaagcctcggcaggagagcggcggcggggaggctttgatgaacttctccatcttctctaggccggcagccatggcgcgtgccagcctgcggcagaggccgccacagacaggcaccgacaaggcgtccaatgccaccacgagcacccgcgtggagtcgacggtgctacagtcggccagtgccagtgggccgagaactgcagctgcccccgccgtgttcgtggaccagaggacggcgtggccgtcgcagcagcccaaggaggtgcggtttccatgcgcagcagcagcgccaccgccgacgccgacggctggtaacctgcagcaagaaagacctagcaacaacaacatgactcctccgcagaaagaagtagagaccaggaaggcgtcagaggctgcgggcgccaccgccacctcatcggtctgctccggcaatggtgctgggacaggaaaggacgacgagtcctggcgccaacagaagaggaagaccctgcaggccgagtgttccgcgagtcaagatgatgtaagcagaggatgtgaagatatcgcacaccttggacactggagtatctaacactggttctcttctcttcaggatcctgacgatgagtccggtgggatgagaagatcgtgcagcagaggtgcgaagcgcagccgcaccgcggaggtgcacaacctgtccgaaagggtaagtcccatgccaatatgccatgcgatcgatctcgagctggagcctggagctgtgcacttgaactcaccgcactgtaatgcatgcaatgcaatgcaacaacaaacctgcagaggagaagggacaggatcaatgaaaaaatgcgtgccctgcaagagctcatccccaactgcaacaaggtatgaaatgtagatggtagatggaactggtagcaataaacagatgtatcgtctcatcatctctctcattgcgcgcagattgacaaggcctccatgctggacgaagcgatcgagtacctcaaaaccctccagcttcaagtgcaggtacactgactaaaactcgaaatgtagcatggttcttcttccatatagatcgatgcactgacaagatatatggtggttctctttgatgcactgacacatcacacagatgatgtccatgggaagtgggctgtgcattcctcccatgctgctgccaccagccatgcagcacctgcagattcctccggctgctgctcacttccctcatctcggcatgggattgggttacgggatgggtgtcctcgatatgaacagcgcggcggcggcggcggcggcggttccatttccgcacatgcccggtgctcacttcccttgcccgatgatcccaggcgcgccactaccacggggtctcggaatcggaatgcctgccagaaacacgatgccggtgttcggagtccctcctgggcaaccaatccagccaccattcccatctttggcgggccttcctgtcaggccaaacctggcacctcctcacgcctcctcagccgccatggctaacatggtgcaggagcaacagcagcagcagcagcatcagagcctgaataatggagcatcaacagcagcagcaacagcatcagatcctcagactatcgtgcaggtagcgtttcacaaatagtgtatataaaaatagctgaaaagatcttcgcctggatctcttatatccaaatttcacaatggttccaggctgagagacagcattttagtgtgccctcttcagcacaaaccgagagcgatcagtttttggatggtggtggcaacagggctatttgtacaggaagaaatgaggctgaaacatgaaaaacactcagcaggtgagtctctgtgtgtgtgtgacctgactcaatgcaaaacttgacacaaatcattgaatttggcacaaaatattcgtatcctaatagagaacatggctcatgacttttcaggtctcgactaacaggctgcagatgtgaatatcagcgccaactcatcctggaaaagagcctaacgagtttcaagatccacgaagcagatccgtcagttgaaaagagtccaatcaatcaagacagggccatgacaggacgtctagctttagcgagctaagatgctcctaagttttgtgtcaaatgtagatggtagatggaacctggttacaagaaacatttcttggcagccggtgctttttttctttttttttgggattcactgaagttttcttggatcagtatgtcttatttcctcaggcattcagtgatcatatgcacaaagatatttgtgtccatatactggctctgctttaactatatctctttgcaaataataacgagctagctaacaattgttcaaagctgcatgcttaagcagatatgtaaccacattattctgcagatgtatgcatagggccaaaagagcacgtactaatatgaaagttttgccaatttgcagtagagataccatagttaaatatcatttgaacatcaagaagcagaaataaattaattcaaacagatgatctgtatagtcaatatacctttatccgaagttatgttctagattgcttagtttgccacacacacacaaaaaaaaacaataaaatagaagtccatatgctggtcaatcagagtattactttaaaaggtatgtagtcggaatttgaactcaagctactggagagatgtctttaaaaatggagcttccggacagcgtgcaaaaaaagctcaatcataaatatattttacttacgtttgattacatgttagcgtcagcatgttgacttcaatccatcaagtgtcacctttgctaggccatcaggaaacaagcattaaattattagtcatgatatagatcgcgtattatacttaacaatactataataagttcaggacccagcatgcggcaagtacaatgcaagaatgaaaagacgggactaaatttttatctgaaatgctgcacttgagatagtcttaaagtacgtacatcttcttcaacctagaaaaagaaagcatatatgcacatgacggtgtactactagtacaagttcatctgctctggcattttcaatattatattttgcattgcccgcccaattaacactctacagtaaacggtgtaagaggataaggtagttatggtatctaacattattgtaggtataggataggattgctttttccctacctattttattcctgatttgacataactttgaagactggtgtggacaggcatttgatagattcatgcatgtggattgtggagaaagcacaagagaagttccctccaataattcaggtcttttcattcagagctaggagttgtcgtcagttttca

SEQ ID NO: 464 - protein, 254 aa, Zea mays
MQCNATTNLQRRRDRINEKMRALQELIPNCNKIDKASMLDEAIEYLKTLQLQVQMMSMGSGLCIPPMLLPPAMQHLQIPPAAAHFPHLGMGLGYGMGVLDMNSAAAAAAAVPFPHMPGAHFPCPMIPGAPLPRGLGIGMPARNTMPVFGVPPGQPIQPPFPSLAGLPVRPNLAPPHASSAAMANMVQEQQQQQQHQSLNNGASTAAATASDPQTIVQAERQHFSVPSSAQTESDQFLDGGGNRAICTGRNEAET

SEQ ID NO: 465 - DNA, 3971 bp, Zea mays
aaaggttgacggaggtccggggacgaaggtcataacccttgggaccattttaatctctttgtctaaaacaataactagaagccatttctattagtttgacagttaaactaaattacggttgcactattccttctattgatacgacgcaattcccatgattctaagcctggtatgtctggcttttttcgactctgggtattaaaagctgttgcggactatcaaatacctcatcttttcggtccgcttcaaaacctattcgaaatcaacataaacacaaaatcggttgagccgtcacgtcacgatagaagtaatcatctctttcctaaaccttttagaccacttcatgtttctgcacacgtattgttcacgatactcggtcagattctccataaaaaaagttgagctaaacagcccctaaagtatatgtagataagcacgattctagtactaaccgcaggacttcttgagcagagcaaaagatggatactccctccgtttctttttattagtcgctggatagtgcaattttgcactatccagcgactaataaaaagaaacggagggagtattaattacagaagaactgacggggcgcatggtttccacgaggtgggcgcaccccggccacatgcatcggcgaaaacaaaatggcagtcgcgaatcgaaagctgccaagctaggccgcatgctggggatgtgtgacacacatatcattggcggtcatggcaggtcgacacgtgtaggcggacgtcatccatcgtcttcatccctatctatctatctatcactcagtacaagccattgctttcgttatcttccgaggcgggcagggcagggcaggttcttccccccttggcacgcaccgcacgcacggcttgcgtggagccaggccagctcgacgatgactacgcggccccggccccgcggcccagtcctccctcctcttcgatcctataaaagcgaggcccagtccctccatctcaaaaatttcaatgcctctctagatctttcaagctatccttgcttcctagctccctttggcgtgctgtaccggacgacaggggtaggtaggtaggtaggtgtagctagctcggcgagcgagggagcaatccggccaacagcacacgcgtcgatcgccatgccgagaagcggcggcggcggcaatggcggtggcattagtagtagtagtagggtgatgcccaacctcccggccgggttccgcttccaccccacggacgaggagctcatggtgcactacctcatgaggcaggccgcctccatgccgtgccccgtccccatcatcgccgaggtcaacatctaccagtgcaacccctgggatctccctggtacgtgattctttatttctttcttccctctcttattcgttcattgtcacttgagttgagtcgttcagactagttgtgttattcctagctaatccaaatctgcacccagttgaatctcatatgatttaattattctttcttcctcctgtggtatcgtgttcgttcttcagccaaggcattgttcggcgacaaggagtggtttttcttcagcccccgggaccgcaagtaccccaacggcgcccgccccaaccgcgccgccgggtccgggtactggaaggccaccggcaccgacaaggccatcctgtcgtcgtccacgcccacgagccacggcggcgccaacatcgtcgtcggcgtcaagaaggcgctcgtcttctacggcggcaggccgcccaagggcaccaagacggactggatcatgcacgagtaccgcctctcgggcgcggcggacgacgactgcaagggcagcaccaggcgcagagtgtcttcctcctcgtcgtcctccatgagggtgagtgagactttctttttctttttcttcttttttttttaattgcacttgcttgcacggctccagacctgactgaagcgtttcgcatggtttcagctggacgactgggtgctgtgcaggatccacaagaagagcaacgatttccagttgtcgtcgtcgtcggagcatgagcacgagcaggaggagccggcggcgggcggctcagcgacgactgtggaggaactagacgctctcgtcgtcgtcgacaacagcagcagcagcgacaccaccaccaccaccatcaccaccaacgacaacaactctactgaaacagctgcgactcatcacgatcctcagacgatgatgatgctgagcaagtcgtgctcgctcaccgacctcctcgacagcatcgactacgcggcgctctcctcgcagatgctcctcctcgacgcgccccacccccacgctgatgacccgccgccacacatggtctactacccaccggcggcgtcggcgacgcaccagcaagcaataatagctaataacaccaacagtaatgacgactactatgacgacgacaacttgttgccgactgctgctgctactgcggtagacgcggcggcggcggcggtgctactcagctcgtcgcctgcagacaccaacggtgtgaacaagaggaagcgagtgacggccgtggactactacggcgccgctgaaccgccgaccttcttccaccaccacctcgatgatggcggcaacagcttcttcagtacgaccaagaagctcaagccgccgccgccaagtgattcgaggcatggcggccatttcggcaccgccacagcgagcagctaccgcgacagccagcagctcgtggacagcgcgagcagcagcggcgtcttcttccatcagtatgggtacggctacagcagcagcaacccgttcttgaacttgaaccagcagcagcagctgctactcaacagccacatcgggatgcagtagagctcgagagatcgagagagagagagagagagagatgatatatcattggaaggatcagcacgcgtacgtgcagattaattgcagcgagttctatcttgtttgctttcattattatatactccgtatgtgtcgttcatgtaaaattagtttaaattgtaaattagtgtgctgaaattcatgtgcctgctctctgctcatcaatgaatggatgatgacgacccatgcacgttgcttgtgtggatgcgtagatgtgctgcatatggagactgacagagagtgacaagatggctagattaattacattccagcaggtagctggaatcggaatatacctaacctaatactctagtttgcttcctgctgaattctgatgcctttttttcccccacgtagacatggacggttccgtccgtacttaatacagtacgtagacctgagagttcatctattttttaagtgtcccgtgacgattaacttaaggctccaaagtactccgtctatattgaaatagaactcgttctggagacggacaaagcaagtcattttggatgctagtactttatttatatatacggctttgccctctccaaccctttgtttttctgtgcagcacgccggaaaaaacatatgttaatagagagggagttcatcccaagacctcttgtcctcaatgcattgaatcacctgtgacaaccaatcaagacagttttttgtccataatatacagccgcaaagctatttaatatgggcaaacatgacaaatgccatcctaattaaccacatcttagtatacacaatcatgtcctaaacgacttctgttccaacatggagggagtacagtaacatgtaattaagatgccatatatcacaacaacaggtggatcacagattcacactccacatgataaattccactgtagaccccgaattattttcttcttcttagaattggagatgccttaaaaacagacatttgtctctcctgcaaaggacagtccataatgcaaagagacaaaatactccaggacaaacaagctaagtagctacccaactcaactttgatctccccgagaagtccaaccaaatgacgacgggccattaatcgtcggctactactagcttgttcataaattcaacgt

SEQ ID NO: 466 - protein, 475 aa, Zea mays
MPRSGGGGNGGGISSSSRVMPNLPAGFRFHPTDEELMVHYLMRQAASMPCPVPIIAEVNIYQCNPWDLPAKALFGDKEWFFFSPRDRKYPNGARPNRAAGSGYWKATGTDKAILSSSTPTSHGGANIVVGVKKALVFYGGRPPKGTKTDWIMHEYRLSGAADDDCKGSTRRRVSSSSSSSMRLDDWVLCRIHKKSNDFQLSSSSEHEHEQEEPAAGGSATTVEELDALVVVDNSSSSDTTTTTITTNDNNSTETAATHHDPQTMMMLSKSCSLTDLLDSIDYAALSSQMLLLDAPHPHADDPPPHMVYYPPAASATHQQAIIANNTNSNDDYYDDDNLLPTAAATAVDAAAAAVLLSSSPADTNGVNKRKRVTAVDYYGAAEPPTFFHHHLDDGGNSFFSTTKKLKPPPPSDSRHGGHFGTATASSYRDSQQLVDSASSSGVFFHQYGYGYSSSNPFLNLNQQQQLLLNSHIGMQ

SEQ ID NO: 467 - DNA, 9201 bp, Zea mays
tactatggttatatcatagcaattagtaaaccatggtattataaaaaatactataccgttggatgggcatccaaaggactagaaaacgtgattacacgtatagtttgcttgtatattagtcgatgtcattataatactgtggtttgaaaactatgttgcctaacagggcccaaacttgctgttcggaacatgatatttttaatgtgacgtcaaccttaaacatatataagctgtttggtttgaggaatgatctagtccatcgtcttctcactcctcacttttttgtttggtttgtggaatagattgagttgatccatcatcacctcattccttatagttatttagttagtactaatatgaggaattaggtcattccaccaaatttgaggaatggatccatgatgcaccactatattttggatgaagtgattcctcaaaccaaacaccatcatagtgacatagtttgacggctcattaacacggaaatcagcgtttgcattgctcggttcagcttttgggataaggacaacctaggtgtatgccctgttcgcttggttttaatttgtaccagcttctgctgtttttatagtatttttgtccctataaattacagttgtataagtccaaatagtcggatttaattcgaaacgatactaagctttcatggaatgtgctacgaatgggatagttattaggattaattagaaatatgcaacttcaatttaaaaagttagaaattagttcatttcatgctattttatgggcactaagaataaaataactatctaaagcagagtgacatatatacagttaatcctagttattatgatctaatttttatgatggcactctcagcttccgctattgtgatccaagtacgtcgtccatcacgaaacgcacggcacagatattgccacgcactgcccacaaggtgctcggcattgcggcgcacgaactcgaaaccgcagaaaacccacgcctttctagctcctgcagtcctgctgttagtgctgttcccctctctcttccccgtcctgcaggctccaggcgctgctgctctcgtcctccgctagcgagcgaatcgctgacgctggcccgacgccgcggcgggaggtatctcgctttcgatcaggtgcgcgtcctactctaactcccagtcgccttcctcatctggctttcgattcggtccggtctgcgcccaacccgtgcgctgggcgaagcttccggaagcttcagggtttatcccggcatttcgttttcagcgacggcgcgcccggatcgcttgatctgacggagtttctatctaggattttggttggggcgtcgttctccggtgcttatctcatttctatttatcggtgcctcgggttcacggccaaattcgctgctgcgtggggctttggagattggagccgattccttaaagtggcggtggcagcgtctggtgggaaccatgagcttcgtgttccgaggaagcagggccgacatcgaggccggtggcttcacagggttcgcccccgagcgccgcaccatggtgagtgtctgtctgctcaacccatgatgcatttctgctaaaatgtaactggtggtagtgtagcttaaaccggtttccttgtcctgatgtctgatcccatttgtatgtgtgcttgagtgtagcgaattcatgcagggagcaggccggtgaatagcaattccttggtttttcttctaactggtaattgggtcgcctatctattaccgacactgttgagctgctaaagattattctttggttaacgttgtgttttttgttgggcagtttttgttttgttcatggtactgaactcacaccagatgtctcccaatcttttggtaggttttcatgctctgtgcaagctgtccatgatttggttaaaattgttttcttattcgtataaagcatgcaactgtggaacagtttaataaccacatttttgttggattgtgcgatcttttcttttcttttagctttggatagtcttgggagccttcctaatggccacgagccttagaatgtatgccacgtgccagcagcttgctcatgctgcagctgccaacagttttcttggccacactgagctgcgtgtgcatgtaccgccgaccattgcccttgctacgagaggccagttacagagccttagacttcaactggctcttcttgaccgtgaatttgatgatttaggtgtgccaatacattccatttgactcatttgatggtttacagtgtttcctgaaaacttagtgacgtggaattctttttgtttcagattatgacactctgagagcactggatgctgacaatagcctgcatgttccttctatgagtgaagaagaaataaattctcttcctgtcttcaaatataaagtccaggcacagcagggaaatgcccctgcccgaaaaaggtaagacgaattatcctttgggtcgatttgttcatatggccataccaagtttgttccagtatctcccatcatcaacaaatgaccaaacatttaattctgaattggagacatggattaatttgtctctatgatgtgtttctaacgaatgtttttcaacagtgatgaggcatcgcagctatcggtttcttcaactggctccggcaatgaggtaactgataaaattgacttgtttctcatggtgtggtagcctgaaaagtatcttatccaatcatgtaggctgttaaaaagtcatgttatttgtgatgtcacagttgttagtcgattgtatatgcaatgatgttcttataatattccattgtaaagacaacatatatgtataactgggcaatgcacttttggctcaccctcatttattgaattattggttgttgtctggttagctttgggatttattaaatattttgtgtcaagactcaaagagttttctagtatttgatgtaaaagctagtgtttagaatcacatagctgctgtgatcactgatcaccatcagcttctgtgcagtagcacatgcatggttcagactttgggccacgatgattattgtttaactcgattctgccttacagaaaaagcaggatggtttaaaagcagatggaactggcaaaactccacaggatgaactaacatgtagtgtttgcttagagcaagtcatggtgggtgatctgttgagaagcctaccatgcttgcatcaggtaatcatgctcattatcttccccttggtttttctagtatggaaacagcagatggtctcgattttgtatttttgtttcctttctgaaatgatcctgataacaccttttattagctctaggttgatatggtacttgacatgttagctaacatcctaaaacaacgccacgaaaccagaatcatgtttgatgtaccaaaagggttaactggtgcattttacacattttgtggatgaatgctttgatattgtgacatacttatgataaaagtttttaactgttattgtttgtgtgtgatatcttactttacggtttacatcttgcacttagtgtgactaggacacattctccaaatgcaactttgaatggtacttcttgctacaaaatatttatagaacatagaaaaaaatagtttatgaaacttccaagacaaacctacctggatatttttcaaatacccacacttagaatataacaagtaatgtttaaccagataccagaatttaaaatcattgaattaagacgactgcaaaacaacacttgtttctggctggactactggacggagtatgcaccagtgtgagatgtcatgttgttggttctggagaacagaaagtagggagtgtcattgtagtttactagtttattgtttttacactcagatctggaattctgtggtttttttgaagcaatcttaaatttgactggttacttggtacatcgataactttctttgctttgtcattctttgccccgcagagttataatttgtcatatttttacacacgcctgatcataatatcaggaatcacatgtttataaacaacaatatagatcaggaagacaggaatcacaagtgaattaggattaagtggcattagaggtgtgatcttgacttacccaatccatctcgcggtcttgccatgccattggcttcctatatttgaaggttggcaagaacctaagactatctccgataggtcctgtaaactgttccctactctatatttagagaagattcttctcctttatacattccagcggtttccactaaagcgtcctctaaatatagaggatgctcctttgtcctttatatataaagactcatcttctctatccatttttatactttaaacaatagattaaggaaaactaaaatatgtataagacatttgatgatatgacaaatacgtacgtacaaaaatctagagcaaaatatgtatctaatatgggtatttaacgtatagaggacgagatatagaggacgctactggagaggaatgagatatagaggagaaaatcttttagggaccgtttggatcccttcattttgaaggaattagaatttacttaatagagtaggttatttgttttgaaatttaacattgcaccacttttcaaagtttagatataagcttatcccaaattcatagttagaggggtggaaattaattttatgtatcactagtctgtgtttatactctgcaatttataatacgatcaacggttggacacaaagcagggagaaaaggatatctataggatggacaagattcgtgaaagggagacaagggatgtcaaccaagtcaaatgcatcaaggatgaagcaaaccaactattagtgaagaatgaagagatcaagaacatatggaaggagtacttcaacaaattgttcaatggagggaatgagagttctacaatagaattgggcaaaccattcgatgacaacaacaggggttttgtacgaaggatacaagaatacgaagttaaggaggcgctaaaaaggatgaaggtaggaaaggcgatgggccctgatggtatccctatcgaggtatggagatgccttggagacatagcgatagtatggctgactaagcttttcaacaccatctttcggacaaacagaatgcccgacgagtggcggcggagtacgttagtaccaatcttcaagaacaaaggagatgttcaaagttgtactaattaccgtggaattaagctcatgagccatacaatgaagctatgggagagagtcattgaacaccacctgcggaatatgacgggcgtgacccaaaatcagtttggtttcatgcctgggagatcaactatggaggccattttcttactaagacaacttatggagagattcagagaacaaaagaaagacctgcatatggtcttcatagacttggagaaggcttatgacaaagtacctaggagtgtaatgtggtgggccttggaaaaacacaaagtatcaacaaagtacattaatcttattaaagatatgtacactagtgttgtgacaagtgtccgaacaagtgatggagacaccgatgactttccaattaacataggactacatcaaggatcggctttgagcccttatcttttcgctttgatgatagatgaggtcacaagggacatacaaggagatataccgtggtgtatgctttttgccgatgatgtgatacttattgaggagagtaggagtggtgtttcgtaaaagttggaattgtggaggcagacgctggaagcaaaaggttttaggcttagtaggtctaaaacagagtatatgaagtgtgatttcagtgccatggggtatgaggatggcgatgttagtcttgatgggcaagtggtacccaagaaagacacttttcgttacttagtatcaatgcttcagaaggagggagacatcgatgaggatgtcagtcatagaattaaagctggatggttgaagtggcggcaagctgcgggtgtcttatacgacccctgggtgccacacaaactaaaaggcaaattctacaggacaacaatccggccggctatgttgtatggagcagaatgttggcccactaaaagacgacatgtccaacaactaagtgtggcagagatgcgcatgttgcgcgggatatgtggtcacacaaggagagatcgagtccggaatgatgatatacgagagagagtaggagtggcgtcaattgaggagaagcttatgcaacatcgtttgagatggtttggacatatccaacgaagacctgaagaggcaccagtgcatatcggaataattaggcgtcccgagaatgtgaagagaggtagaggtcgaccaaccttgatgtggacagaggctgtgaagagggacctgaaggagtggaatattgataaagagctcgccgtgcatagaaaggggtggaagtgtgcaattcacgtgccagaaccatgatttgtagtttcgcttttcctccttaatcgtttgaccttctcttgtgcccttttagatcttgctggttcttatgggttttatctctttttatgtgtttccccgtttcatcgtttttcggttctcctttgcctttgtctcccttttctcttctttgggggttgagctctgaggttttcatatggggtttcatctctagcctaccccaacgtgcttgggacaaaaaggctttgttgttgttgttgttgactcgctcccctatagtagaaatgtagcatataaatatctctcccatatggccaacggtagtatacaaatatattctatttagaatcatattagcttaattgatatatgtctaattacgattattagaatgtaattcatttccaagaacccaaacggaaccttagagaaaactgtaaatgagggacatagaagagggatatagaggatatggttgaagatagtctaagagactattgtacaaggcttgctatagccttgaggccttggccataagcacaacctagcttttggcctgcgtatgcaatgcagacgcatgtcagcttgtgttgtcgaatggagaatgatgttgttacacgtgcataattgaaaatgtatcactttgaagatatgcccaacatagtgctaatgtgattagtgacagaaaacaaatgcaagttcttcacatggaccccaatccaagatagaatcgtagcagtagataatctaccaaagagggatggccacaccaaatttcctgtatgtgtcttatgccccttcacggttgacgtctggaggagggtgctagtgtgggggcacttctctttaactccgcatgcacaggttgcaaagtgcactaaccttaaagatttgtgggaagctgcagtaaagatagtagcaaaaaaataaaagaccacttcaacgggttatgcatctatgtcatgtgggatttttggaaaaaagaaatcggcggatttcccaaaatgattgctccacgcctataatgattgtgctacgcactaaacaggactttgaacaacgacaacatgcttttcaaaaactagtgttggaggccttcatgtgcaatttgtttctgattctttgtggtttgtctatctcaagggcttgggttcctgttgaggcgtgtctgccccttagaacacccttaacaatagagtcaacttgttagctcatataaacttaaaaaagataaaaatagagtaacacgatgacatactagtatacaaaatcgagacacatgtatatagtaaagtgtttgagcttagttctttaacttgtcattacctcttcttattcaataaaatgttttatcactttatgacctagctcttcaaacactgtttggagctacccttggcaaaactccgtgtcctgtgttctcccttcaatgcaaggcagagctcttcaaaaaagaagtgttaatgtgatgtgtcctgatgaggcaacaatcgcaacactgcaagatttcttactttgtcttttgttttgcagtttcacgtaaactgcatcgacccatggctgcgccaacagggtacatgcccaatctgcaagcaccaggtcagtgatgggtggcatgccacaggcaacggtgaagaggatgcttcatacatggtgtaagtagctgcccaggagtaggccataggtaactagtagctgctaacagaatccgtggaacgctgttttggaggtgacggtttggacttgcaatctagggatgtggtctaatccctgtctaccctaacaaaaaaccgagtgtggaatcagctgtccagtgcactgagttcttgtacaactcatgtttatttctctcattctctgtgatgttgatgcataaaaaggttgctgataatcttcttacccgtcctttcttagtatgctcggtttcttttcttttttgaacgcaatggcagtagctttatgctttgttaaaagaattaaagaaacaaaattggcctagtttacgagggaaatgagcctagaatagggagatatccgatggtcgcacaaggtaaatacttcattacccgtaatcagtacccattatggatataaaattatcccatgctcatgtccatcaaaatttcagtagacatggttattttaatcataaaataggtatcaaatacaaactattaaagcctcatacatcatcaacaataaatataataaaatagaatattatgtttgtgtccgacatgacaaattcttgaaactcgatatagttttatcacatgtttaacatttaattttatctgaaacacttggtaatctcaattcccttgtcataggttaacatgtttttcatcggacaacagatcatgacagagaacatatacatgtctaccatagccgaccgatatatagtaaatgatctaataaaatatttgtgagcatcaaaattcatcatacatgtgctctaatgggttttttaccttcggatacccaatgacatctctattcttcaccaaattgtcggctcaagttgttagatttggtctaataatggacggtggcaactgttagaggctgctgctggcgcgtttggaggaggaatgtgttatggcggcaactactgcatctaacacagtgtcgctggtcgcgataatccttctcctgtttttatttttaaattttatttcggaaacgggttcgaaatcgggactagcaagatgacgaaaatgaaccaaaataaaaagaacaaatcataacagatcagaatcagacgtaaaagcggaaacatcgtcatataaagtataacaataaagtagtattgtgatcaattaaaacat

SEQ ID NO: 468 - protein, 280 aa, Zea mays
MSFVFRGSRADIEAGGFTGFAPERRTMRIHAGSRPVNSNSLVFLLTVFVLFMVLNSHQMSPNLLLWIVLGVFLMATSLRMYATCQQLAHAAAANSFLGHTELRVHVPPTIALATRGQLQSLRLQLALLDREFDDLDYDTLKALDADNSLHVPSMSEEEINSLPVFKYKVQAQQGNAPARKSDEASQLSVSSTGSSNEKKQDGLKADGTGKTTQDELTCSVCLEQVMVGDLLRSLPCLHQFHVNCIDPWLRQQGTCPICKHQVSDGWHATGNGEEDASYMV

SEQ ID NO: 469 - DNA, 4810 bp, Zea mays
gggccaccttggacacaaggagagccaaaaccaagggggttacatccaattaataactaattatcttattcaaatcgcacccatatggattactcaacaaaaagacgtggtttttaagagaatttgagtttccaaactagccctaattcatggtaattgatatcatcatcgataccagcgaagatgcaaaataaggagaatcaagggttcgaggtgacgaagaatatggtactgcgagaaaaaaaactacaataagatccatgaaaatgggttgttaatttgcaaatggttttttgagcgtgaaagatgtgatatcttgttttcttttggtatgctcctcttatttcttcataaacctttcataactactataatatatcgtttcaatatgtgttactttttttatatctaccatttttatacctgcgagaaaaaaatattagatcgagaatcaaacatgtatctatgtctatgtctataaaaacgaacttacatctaaacctacactcagagtttttatccatagaaatgtggccgttgctaatcgtgagtattaccatacttgtaggccgttcggcctaacacagcctaaaaacatttaaattttagagcagtacgacatgtaataaatatagaccgtcagcccacatactcatctctcggcccacgacacggccgggtcgccggggtcgggtgcgtccaccgtccagtcgcggcggcccgccacgtcaaccgctccccgatcattctcatccactcctctgctttcctcaaactcaaaggaaagcacgcgagcagcttcccttgcacgcctccctctcctctcgtccatccgttccccccttcccctgcttcccggctctccctccccccatccctgcacgccccttttcatgcgcgaggaggggccgtggggaccaccaccagcacctccatccgcgcgcatctcgcggtggtgctcctcctcctcctccccctgctcccggggcgggcgctctcctgttcctcctcctcctgctgctggtgccagggccgggagggcggcgcggaggtggcgctcatggggctcgccggggacgggtcggcggacaccgccaacctcaggtattatcccctccctctccctgtctttctgttttcgctttggcccccatctgtccatccatcaatccggttgccttcgctaccccttttaggaggctatgacgcctcggagccgagatccatggcatcggggatggataatggattacgctgtaccacccccttccccctgcttgtctgaggccgtggattagtgatgccgcaattgggcaccgggcttgagcgcgaccagcccattctttcgtcttgatctgcgcgattgatatagtaacctgacttgtggccacttgtttgatcacgtcgatggtgagggcgggtcgctgcctgccctgggattggggtcagatcgttcggtacctatctcctgcctctcctcatgattgtcgctgccagccacttctcaggttccggtgccggaaacgtcaggatctgctaagattggggacatacatgactgatctaagctccagtaactaaacctcgtgccttttgttttaaccgaggattctctaggatttcgtgtgctcattagccatattggcctcgctgatctattggggcacttaagtataccccttgcaaacattgcatccatgctctttcatactaaatacagacctgactagctagatgtctctgtctgcaagtctgtctatatttggtgcttggtggcaaacggctgacgagcttatgttggttctttaatctttataatgtaataacttagcatactagtgtgttagatagactgcattccattccaaactaattaaaacagaaagaaaaagttactgttactctgatgaacttgatgggagttagatcctggatttttctggaacatgaagcacccaagcttcctgtcagctcaatcagtttatctatgccataggaaattcctcatactgattttctgccctgtatataacagtgcgtgcaatgtcgtgtgagtccgaatacacacctatttgacacacaacgtttccacctgcagtaatagtgaaaatggtcggttcagttatggagttgcaagttctcccgggaaaagagcatcgatggaggacttctatgaggcaaggatagacgacgttgacggagagaaagttggaatgtttggtgtgtatgatggtatgtattgcctagtgacatctgaaatcatatcaattcagttggttcttctaatgccagcgctccacgatggcattgatattttcacttataaggtgagcatgttttttctgtttctgtaggtcacggaggagtcagagcagctgagtacgttaagcagcatcttttcagcaatttaatcaaacacccaaagttcatcactgataccaaggccgctattggtatgctcatactaactattgaggacttttgacttctacactgacatatgatggtcttgatatcctcccgtttttttttttttttgctgcagctgaaacttacaaccgcacagattcagaatttctgaaagctgatagcactcaaactcgagatgctggctcaactgcctcaacagctattattgtaggtgatcgtttgcttgttgcaaatgttggagattctagagctgttatttctaaaggaggacagggtaagtttaccgtcgtaacatggcatatctcagtgtctattcctatacttacacatgtatcagaaacttctgtttgctgtgtattttcctggacgagtatttccccataacgaatggatgaactgtgtgcatttggtagagatccagattctctcagaaacattttgggttcagtttcttcttagaaacgtttctggtgctgaatcagaatcagtttctcaaatcgtttgtcaggattccaatctaatcgcattacacttcaacaattttatgatgttttccccatcttgacctgcagcaattgcggtttcaagggatcacaaacctgatcagacagatgagaggcaaagaattgaggatgcagggggctttgttatgtgggctggtaatggttcctctgaatttttcaataaaaagaaaccatctatctcagtacgtgccgttactgttatttgtactgtttgattattcgaaatctgtagggacatggagagtgggtggcgttctcgctgtctctcgagcatttggtgataaactcttgaagccgtatgttgttgctgaccctgaaatcaaggtttgtcatgcatttttgtttttactatggattgcctggatattttttccaaacatatcatggtttgaggaaatatggtgcgtttgtaataaatgcctaaaaacggggatcccatcataagcaatgtcatacatcactcccaacccccctgtagccatctgaaaacggcttttgctattacaatcaggaggaggtggtcgacagctcccttgaattcctcatccttgctagcgacggactctgggatgttgtcactaatgaggtacctacagatgttactaaatatctccttcggtgcaattggtctgtctgtctgtcactccacctgatgtaatgtattttacaggaagctgttgccatggtcaagcctatccaggacccccaggaagcagcaaacaagcttctcgaagaagcttcccgaaggggaagctccgataacatcacagttatcatcgtccgcttcatagacggaactaccggtgagaaatcaggcgacgacaaagagaccaccaacgaccaacactcctagctgtctcgtgtagggatccatcgtgctgtgtgttcttctggctgttgtacctgatgctcagagtagacgctggctgctgctccgcaaggaaactgactcccccgaccgccgttcatgctcctggctggctggctcgctggccgcctcgacgggaacgctgccgtagaatgacgactggggctggtgttgttgttacagtatggtccttttttctttcttctttcccctttcatccattaagctctgtgatgtagctgcccgtgctgttgattcatgaaatcatgctagagattttttcctggcagtaagtgcgtgcctgtaaaactgtcgaacaatttggacgaaaattgtacactgcagtatgtaaccatcaaaatctccccccctacattcgccttgtggtgttctgctgtcatgcctcctgaaaattgctaccaagccgtggatggaggtgtgcaaggaatcggaaagctcgagattctacagagcaagtgcgtggattatcatagtactatcaagcgcattgattggtacatatatgaatttcgaccaaacaagaacgaatatatgaatttcgatctaaaccgtaatcaggaacatgcaagtgcatggaactaaaaagaattcgtggtgctgactgctgacaagtcccacgactcttgtcttgtgtccctgtcaacccacccacattcacgcacctgtaaaatagttggtatagaattgtttatttaaagctagagaagtctggctttgtatatattttggaacagatgggttagagtaggggtgagttggtggtgccttggccttgccttgggttatccggctttgattcggtcagtcgtagtagcgtgagtgaggtagctggctagtctcgaccctacttgaaaatggagatgcggaaaaaaaaaagctagctagaggccatgacatgggtctcggcaatcttattatgccttgactctaagtgcatgacgaggcacgtgcatccgattcaggggtc

SEQ ID NO: 470 - protein, 290 aa, Zea mays
MGLAGDGSADTANLSNSENGRFSYGVASSPGKRASMEDFYEARIDDVDGEKVGMFGVYDGHGGVRAAEYVKQHLFSNLIKHPKFITDTKAAIAETYNRTDSEFLKADSTQTRDAGSTASTAIIVGDRLLVANVGDSRAVISKGGQGIAVSRDHKPDQTDERQRIEDAGGFVMWAGTWRVGGVLAVSRAFGDKLLKPYVVADPEIKEEVVDSSLEFLILASDGLWDVVTNEEAVAMVKPIQDPQEAANKLLEEASRRGSSDNITVIIVRFIDGTTGEKSGDDKETTNDQHS

SEQ ID NO: 471 - DNA, 3838 bp, Zea mays
accagaacagcacagcacaggtaatagtttctgcaggtattcgtttgcagccgctacaagcgaaagctgcagctgcatgcttgacttggactccacgctagtacagagtcactggacacacactgacacacacatatggactctggagtctggagatagagcatgctgccacgctctatttccgcggtacactgtacccggacaagtacgtcatgcacgaacaaatactggtaccgtacgtagcgcgtccttcgagtttgaataggagtagacgatcacgggctacgtccgcgcatatagacggaggtgtctccgcggcagccgagctagatgtcaacagcgtcctcgtcagatctcgcgcgtcgcgcacggccggggttggctgtatctgtctgtatccccacagaagccgtaggaaaccggttcagatggtcacgcctcctcgcggctctatcagcagtgacctgtcccgtttgggaaacggccggagagcaacgtcacccgcgcagtcggattctctgccggacaaccgaacagaaaaagagagcccgagttttcgtataacaccgccagtatctgtatctatccatctagctgatctgatctcgtgccgcaaaagataagtcgacaacaagcacgtgcggtgtgcggaatgtcgtcagggtcttggagtgcgtagagtatttttgttagccatagcatgcgacgacgcgtaggagagcacacaagatcctcctgctgttcgtaattccctgagtaaagatccaaacgaggaagagacgtccactcgctagagccgatcagtcatcaaaccagctgagcgaaccgcaccagctgcgacaagcaccacccggcacccgcacggccgcacctgggttttctcgacccatctaacccgaaccgtttctaatcactacgtccacgcctgcctggctttcgcatgcaggctttaaggaccgcgtgccgcgttcgacgacgcatcagcagagcgctaaaaggagtctttgcagttgcaggtcgagtgagatatgatatggcgtcggagaccaccaagaacgtgaaggccaccctcgacgagcaggaggtaacctcgcatcagcgcgaccagagcgctgccgaggaggaggaggtggtggtagtggtggatccgctggcgcggcagtcgtccgtcatgtcgcttacgctggaggagctgcagagctcgctctgcgagccggggcgcaacttcgggtccatgaacatggacgagttcatggccaacatatggaacgccgaggagttccaggccgccaccgccaccggcggctgcagcaagcaggagggcacgcagcgggagccgatgatgcccgtggcgaatggaacaggtgagaacggaggattggttcggcaggccaacgcggcggcgcaggccgtggtgcagccccagacggggagcggcggtggcggcggcggcgtcgccgccagcgggcggcagcaggtgacgctggccgacatgacgctggaggacttcctggtgaaggccggcgtcgtgcggggagccttcgccggccacggccacgcggtcgtcggcatggccccaatcccagccgggcggatgggcatccagcagcagcacgcggctcccacgatgtcgtaccaagtggcagcgccggcgcccaacgccgtgtacccggttatgggcaacggcacggggtaccacaacgggtaccccagggccatcgcggtggtgccgccgtctcagtgcgtgacggccgccgtgagcccggggtcgtcggacggggtgagcgcgatgacgcaggcggagatgatgagctgcattggcaacgaaggggcagggacggtccggaactacggcggcggcggcggcggcggcagcgcgcggaagcgcgactcccccgaggacgcgtgcaccgagaagaccgtggagcgccggcagcggcggatgatcaagaaccgtgagtccgcggcccggtcacgcgccaggaagcaggtgtgcgtgctgttgttcgcgtcagtttcgtggtcggtctttgtttgggtcattggcagactgccagactccatcatgtgctctgaaatggcgctggtgtgcaggcgtatacggtggagctcgaagctgaactgaaccacctcaaagaggagaacgatcgcctcagagcagagcaggtagtgacaagaatggccatcatgtccttttcctatccgctatgcatggctctgatcggacacgtctcttctttttctttttcttttttttttcagaagacgattctgctatcgaagaaaaagaaggtaacttcccctcaatagcgctattctttagttttacggagtgtcgagcatttgctagctgtcggtgtaacaatcgacacgctcgatcatttgctagttgccagagcaacaatcgacatgctttgtcaagacaagtgacctcaaaccctcatgccatggctcattggctttcgtgtctgttttcagctggtggagaagatggtggagcaggcaagggagaatgtgagcgccaagaagggcggtcgcgggctgcgccgctcgggcagcgccatgtggtgaactgtgacgactgacgagtgtctcgaattgtgcagttccagtccgcttgcttagttgcttgtatgggaaaaaaatcctgtacctgtcggtagcagcaccgttagtaacagtatgccatgtggtcgacacaaacgtctgcgagggacgatatggggcatgggcgagagcttccgcgttggcctgctgctgttcatgagcctgggttgtacaaacaataaagcaactgtaagatagtagtaattaaacacaaagctctgtgttttcgtccatgtttgtttgacaggggccatactatgccgtatgcatgtcagtgtatcttttgcatttgactctgatagatagtctcgtgtgcggtcgaatggtcgtctagcttggattcggttgtttcagaggctaccaacaacagccgaatgttcagaagcaagaaccgacaaaaatctgagtgctagaggcggtgaagagttggtgtagtcgtcctaccaactcttcaacgcaagcctcgctgctccgtgcccgcctcctcgcaccgctgctgctatcacccgtcacgtccagttgctcatcccagcatagtacttctttgagtaagccatgccgatgaatagttggtgtagtcgtcctaccaagcataccagaatatgtcatcatacgggaaaccagcggacggtcgtccgagcgatcgacacacgtagagctgagatacgtagctgatgcaatcatctctcttgaatgtggctccgaccacatctgagtgctagaggcggtcaagtttcaagcatgtcatcttgcttgacctgtcaaccagagaaggatatgcagtgatcggtgaattgctctgcagatgcacaataataaataaagcatcaacttctcttggtcatgtggattggcaatgttggttgcactaatcggctcttttgatatgattgtcctcttttcgtgagttgattttttttacgaaggggtgaagccccctatttcattaagaaataggaaagtttgaaacaaccgtcaccccgcggcacatcatcccaaaagatcgaacacggccaggaccctatctagactctaacctatcaagctagatcagtgaagagcctaagatagcagaataagttttggcctacgatgaactacataagactttcttatttacaacccaacctgacaggcagaagccataaaaggaactgaacattctagccaacaaaagacagacaaatatcaacatcatcttccaagttccagcttccaaatcaaccagaaa

SEQ ID NO: 472 - protein, 385 aa, Zea mays
MASETTKNVKATLDEQEVTSHQRDQSAAEEEEVVVVVDPLARQSSVMSLTLEELQSSLCEPGRNFGSMNMDEFMANIWNAEEFQAATATATGGCSKQEGTQREPMMPVANGTGENGGLVRQANAAAQAVVQPQMGSGGGGGGVAASGRQQVTLADMTLEDFLVKAGVVRGAFAGHGHAVVGMAPIPAGRMGIQQQHAAPTMSYQVAAPAPNAVYPVMGNGTGYHNGYPRAIAVVPPSQCVTAAVSPGSSDGVSAMTQAEMMSCIGNEGAGTVRNYGGGGGGGSARKRDSPEDACTEKTVERRQRRMIKNRESAARSRARKQAYTVELEAELNHLKEENDRLRAEQKTILLSKKKKLVEKMVEQARENVSAKKGGRGLRRSGSAMW

SEQ ID NO: 473 - DNA, 3340 bp, Zea mays
tatgtaactatgtcgttgacctttataaatttgtattacagggaaatattatcttgttgacttcgggtaccctaacaggaagggatacctagcaccttataaaggtcaaaagtaccacatttccgaatggcagcatgggaggcaaccagttgttgcgaaagaggtatagtattcaactatgcgcactcgtcgctgaggattgttatagagcgattgtttggggtgctgaagatgaagtggagaatcctgcttagactgccttcattttcattgaggaagcaattgaagataattatagcatgcatggcgttgcataacttcattcgggacagcgcgatacacgatcatgactttgaccagtacgtacctagcagtaggcatgttgatgatgtagttgtaggtgagagtagtagcaccccgcatatgagttagatatgagtgcttttagggattctattgctaatgtgttagtgtcgtaggtacctatctgggtgtaaataaataacttgtacaagacaaatcatgaggtattgtaagtaccttatgattgttaagcatgtttgtgttttttccattttttctctcagaatctacactaaaattctgaccacccgttttttttcacagcagtcgaactaaacaatcagatttttatcatccagcttctccttacagccagattttccttatagccagcttttcagctgaaccaaacaggctcatagagtggttcatagagtggtgaggaaagtaaatgcatgcaaattaacctatggaacaaaaggggtaagaactaagaaatagcgcagtgtgtacattgttgcagatcagtggctgtggctctagccggggtcctccctcgcgctcgtcggccctccgctaccagggcctcgcatttcacgtgctcccctttgcctcgctcgcccacacgcacaaacaaacgcgaaggctgcccggccctcgcggctatattagccagcgcctgcccacgcaagagactgcacagagagaggcctaagcaccagcaccagcaccaccaccagtgatccggccaaggtccgtaccgaccaaagacggccggggaggagatggccgcctccgggaccgggaacaacaggttcgcccatacatgcgctcgcgtgcggcagttcatgatggagcagaacaggcaggtgcgaatggatgacctcatcggctcctcctcgtccccgaggccactgcaactgacgccagtccctgtagcgacggggccgccgccggcggctgcctgggagaccgacgccggcgctaggactttgccgctgttccccgtccgcaatagcagtagcacggagatcatcaggtgagcgagctcgagttatgcattaattgatctgctggctagctgacgtgttcttggcccggcttaattaatttctcgatcggtttgttgcaggccagagcaggaggccaaggccaccctaaccatcttctaccagggccaggtggcaacgttccacaacttcccggcagacagagccaaggaccttatacaaatggcaggttctgtgaccggggaggcgccggggaaaggggtgacgacgacgaccgccgtgccagaaaaggccgggaccagtggtggtgagccgtcggctgcaggggtagctggcacgccgcccatcgcaaggaagctcacgctacagaggttccttaggaagaggaaggacaggtgaggacgagagatcacatgcgtgcactctctcacatcggatttgtcttatcagtaacttctttctcgatcggtgctgtttggaattttgcatagagcattggatgatgacaatgcgcgtgtgtttttactcgcaggatcgccggcgctgacggccgcggccacaatgaggatgctccgccgcggaagaagacagactccgctggcgccggcgccaacgaccccgccgaatacgttcctgatgaagcctcgtggctcaggctctgaaacccgctcttcactgcaaatttgcaggagaataatatgaatgagaagggcaagagtgctggcatgcatgccacacatcctctaaaatgatacaataatagtgccgtgtgtgcctgtcagaattcctaagaattcttaggcattgtttgaaagggctgtaacttttttttctgaaagcaccttgccgtgaagcttttagaacatctctaacaggagagatgtatagaactctagcgcaaaaaattgcttcaacgagagttctattttacaaaaattcatcaaaattataggactctgtcagatattgttaacattttatttcctaaataatatgatataggactcagttttgttggagccgtaaatatttttatggccttgaacactttaaatcaggtcttattttaaattttagaacttaaatatatgactttttgttgaatatactcttaaaaaacttgaaaagatgctctaagatagtttgtgtgcttttagtataaagtgcagttttttagagtttttgtaagttagaagaagcaaccctcttatttatcaagcttatggcttttcgaactttttgagaaaagcaaaagctggcggaagcttctccaaacaaggatcttaaaatggttatatttcctttgatttaaggctggctggtaaacgattggcaggatcgtatcctttgcatatctgttaatgcttttctgtggtaataatgaacaagcaggatcggtaaactgatggcaggatcgtatccattatccaatgtgtgatctattgctaactttcgtttttccgatcaaaatagagagattaaaacaatgttatcattatattattaacaggtgcttcatataaaaaccaagcaactaatactcggtttgaatctcatggtctatagtttagttagttaaagttaatgactaatctttaaactattttggatcgccgtatggtctaataacctaatcataatattaatctggataattttcatcaacgagaggctgacaaaaaataggctgaacagataggttaattatttacatccatcaacaacctagggtgattggtccatcgggctgtccacatcacgtcgtgtaatgagaatttatactgtaaattacactatttatagaatgaagtttgaaatagattatgagataggataactgttgggtcccgtggctccgtcgggcacgccttccacccactcgagccacccatttgcaccatttcagtcattctataaaaccgatgtcagccatttcgtgtattgttcagccattccatggaactaatgtcagtcattcttgttttgttcggctattccatggttctaatgtcaacgacctattttta

SEQ ID NO: 474 - protein, 218 aa, Zea mays
MAASGTGNNRFAHTCARVRQFMMEQNRQVRMDDLIGSSSSPRPLQLTPVPVATGPPPAAAWETDAGARTLPLFPVRNSSSTEIIRPEQEAKATLTIFYQGQVATFHNFPADRAKDLIQMAGSVTGEAPGKGVTTTTAVPEKAGTSGGEPSAAGVAGTPPIARKLTLQRFLRKRKDRIAGADGRGHNEDAPPRKKTDSAGAGANDPAEYVPDEASWLRL

SEQ ID NO: 475 - DNA, 3955 bp, Zea mays
aaaacctgcgggattaacttgagaaccgacttgtaatgggtccagacctccaccctttttatagatgaaggggtacaaccgattaaacccccacaatcgatcaaatcaattatatatacttatcatttttaccttacgcattaggagtagccctagtttagccttcatctatctcgaaccttcacatctcttcggctctatgttaactagaggcgtcttgggtggtctgccagcctcaagacacaccctaagatctctcctacctgacgaggtccctctcgggatgcgagatctaggtctactacgaagaagacagccctctacgccatctggaccgtccgagccccaagcgtagaccttccagacgtacgtagagaaggagccgctcttgcgttcaagttgtggactgtctggcccagggccgcggatcatctgcgcctccgcagagagcaccgctagacggttcatttcccggtgtttaacgtccagatcggcaccaacagtaggcaagagaaaagaatttctcaagagaaaccaagtagcatgaaactttgtctgtgtgtgttaggattatgtcaaattcaatgcaaaatgcatttagcggccacaaatcatattagaaccccaaagcacaaactgacaaaagcaatgcataaagctacatgggaagggatttttggatccagaaccctggaggaacatatcttgaagttcatgcagatcaaagtaaaagttgggcgtatttttcaggctgttttgtttacctggggaggctcaaactggtatatgaagcactgctgcttagtttaaggattgttttgactgccgtacctgggtggtgtaagtgtgaaccgaaagggacggagacagtcttatctctcctagattgtccttattgagtcactgatccgccatttaaataaaccatgacagcttcaaatagagaaggaagtacatacaattgtttaatcttcaggctggtgggcctcatcaagcacctctggccttcatatataaacacaaggtgtgtaatagatttgcaagtgcagtagtatacagttcttgggtgttgtcttcacctcagcagcttcatcccagaaagccattcacaagataccttgtaagtttgtaaccaggagcaagcaggggcttcatcgctttagtttgcaaggtatggaggagaggaatggcaccaacatggagaagtcagatgagatcctgatgccgggtttccggtttcatcccaccgacgaagagctggtcagtttctacctcaagaggaaggtccagcaaaagcctatctccatcgagctgatcaggcagctggacatatacaagtacgacccgtgggatctcccaagtaagaagacgccacaccttctttcagaactcgtactgctcagaccttctttcttgaagtttacggtttgttcttgttcattcatcaacagagcttgcgagcaccggtgagaaggagtggtacttctactgcccaagggatcggaaataccgcaacagcgtaagaccaaacagagtgacggcagccggtttctggaaggccacagggacagacaggccgatctactcctccgagggcaccaagtgcgtgggcctgaagaagtccctcgtgttctacaaagggagagcggcgagagggatgaagaccgactggatgatgcacgagttcaggctcccttcgctcgccgatccctcgctccccaagcgtccgatcgacaagaccattccactcaatgtaagtagctagcgtctgcaggcaatttcacattactgtacagtccaagagctagattccaaacgtggtttttggcgcaagcaggactcgtggactatctgtaggatcttcaagaaaaccagttcgctggcgcaacgagcgctgtcgcacacctgggggcccccactgctgggggcaacagaggcagatgatatgatcaacgcgttgcagtcagtgcaggcttcagaattcgctctcgagagctcactgcaggttgcaccggctgcgcctgcagcaggccagttcagcagcaggcatggcttgcatgttcatggccagcaccagcagaagaagggtaccaacagcccgtctctggacggctcctcctcatgcaagctcatcaacttcaccagcagcagcccatccgaggagggacgaccccagagcttgagcttcccagtcaccttcccctttgaagtgcaagggacgcacaagactgcagccgccgcgccagtcttcttcggcgcgcatcctgatcatcacctcggtgggttcgttgtcgactcttctgccgatgtcaatggcggcatcgtcggtggcaggagccaggactcgtccaccaggaagcccagcaataatggcttcagcaccagcagcggtgactgggaaactgcggggagggtcagcttcccttttgatctgggtgcagattcttcagaggagtggaggtgcaacataccctgggagtccttgctgaccccggctgctgtccaggctgagctgctgccacactagggcagggcagcggcatttagcaattgcattgcattacggagagtatctcataggtttacatgtacagtctacaggtgctgtgagtgtgagtttccttcatctgttagcatttctgttagctgcagaaacatttttttttggttcagttttggttaggaatgccatgtacataccacgagctatgtagcattgttaacagcaaagctaacagagagaaggaaccttgtgttgtacgtacactattcagctctttgaatacttcagtgcaagtttgaatactttattgcgtcaaaacactggggccagtctgcattaaactacattttggactggtacctcccattgaactacaatcgatgaaccaaatacgccctccgttagcatttctgttaggcgaattcttcagttttggctacgggagccacgtacacagcctggataaaattgtgcgcatgtttgagaactttatgattatgataaatcgacaaaataaataatacacggccacactgcttgcatagatatgaatgggcatcaagagcaacaacgagcaacatggacaaaagatgttacaaaccagaaggttgatctttgcatagataggatctgaattcataataaaagcaactaggggaacagattcccgatattccaacaattcaaaggtgaaagggattcagtgtccagaatctctaaactcacatgctaaatgctcaacaaggcacctagattttccatccaccaaaattaattttcgcagtgtacaaaacagggctaggcttccccattcctggagatttactttgcagctgtcttgtccttggttttttgtattttcaggaccttcttgacaatcttctgctcctcgaccaagaaagcacgaatgattctgcatacagtagttgtaattcataagactacgaaattacagaacctggacctccacaccacaatatgtccaccccctatttactcacctctccctaacagcaattccagagagtactccaccataaggacggttcacagtcctgcggctcctaggcaacctggaccttttgtactcagcaggcctcaagtgagggatctggaaatatggaaacaatagcattaaacaatattaggtggaaatatccaatgacagatgaatacccagttttggtgacactgagggcattgttcaggtagggagggaaattaccagatgatgattactatggagaatattatgccatggaaacaaccaaataaatagtgcaagcacacatagaagaaaaaaaatagcaaaatgcacgtatattgctacagttcccttttatgttgattatagaatataaaacacaaagacacaaagaaagacatgtgtgttttgttggctaggcgggtgtggttgtgggtttggagccaacaaccatggttcaaatcacc

SEQ ID NO: 476 - protein, 392 aa, Zea mays
MEERNGTNMEKSDEILMPGFRFHPTDEELVSFYLKRKVQQKPISIELIRQLDIYKYDPWDLPKLASTGEKEWYFYCPRDRKYRNSVRPNRVTAAGFWKATGTDRPIYSSEGTKCVGLKKSLVFYKGRAARGMKTDWMMHEFRLPSLADPSLPKRPIDKTIPLNDSWTICRIFKKTSSLAQRALSHTWGPPLLGATEADDMINALQSVQASEFALESSLQVAPAAPAAGQFSSRHGLHVHGQHQQKKGTNSPSLDGSSSCKLINFTSSSPSEEGRPQSLSFPVTFPFEVQGTHKTAAAAPVFFGAHPDHHLGGFVVDSSADVNGGIVGGRSQDSSTRKPSNNGFSTSSGDWETAGRVSFPFDLGADSSEEWRCNIPWESLLTPAAVQAELLPH

SEQ ID NO: 477 - DNA, 4113 bp, Zea mays
cgacagtaaagatagatagaaaaagtagtgctgtataaagttttttttctcttaaaaaactacaaaagagaagtaacgcgtacaacatgttttcgctgtcgctgcaagttgaagccaagagagaatatatatgtggtttgtattgtacgtataagtatccctggacggatataggcgtatgctaaggtatttgccgtgtcctgttttgctataaaataaaaaaaaattaatggtgttatgagcggcacggttgagtctgctattgtctttggagtaccaggcaaatgagtttataaaagtagaataaaattatgtgtattgctagaaaataggctaaatttatgcgggttacttgtaacaaaaaaatctaccctttttgcaaatggatagataacgtcctattcgaattcgactcgtcaaatagaactgagattcgatatatatccaagtctgtatattcagtatcatatccgtgtactaacgctagatatttaagatatcgatatctaattagttttattcgagacaactaataatatcttttaaatttaaatagaaaatataaaaaatatatgactatagtacgattacatccgtagttccctacccaccttgtacgtttaatggtggtctcacatgatagatagaagtgctccaacatggtgatgtgatatttttgtttcgttacgcgccgaccgcgacgaggccgaccgtgccgagaagacaaaaataatatcagtcggggcggtggccagccgtgtccttgtatccgcggtccgcggacccgccgcctcggccccttggtgccttggtggtggcgtgggcgtggtccatggacctggcgcacacacgcacgcacgccccagcgggcagcgcccacccccgcgccctcgggccccgcgcatggataactcgtgggtggggcccagccaaccccccttccgcccgcagattttttgcgagacccgtcggctcggcctcggcgtgcaagaaaccagaccaacaacaaaaaccgactagcccaggcaagcagaaacccactgtctccgcttccgctcccgactcctttgtctcgtcctcatccatccaaccaggcgagccaacaagcaagcaaaagtaaacggggcgaggagctggagagacgccggcgacgcgaagcaaccgcccgatcggagccgcggctgagcaggagggagccggagatggtgggtctcgtcggcggcagcacggcgcgggcggagcacgtcgtcgccaacgccggaggggaggcagagtacgtgcgccgcatgcaccgccacgcgccgaccgagcaccagtgcacctccaccctcgtcaagcacatcaaggcgcccgtccacctcgtatgtcccccctccaccccgctctttcctaccctcaacgcggctggccccggtggttcagcggttggactgcctcgcgtctgggctgctatttctcttcggatctggagtcaggagtccttcgtccgatttccaaggccttgttgggtgtctcccccccaccgacgtgttctcgtgatgttgggttaatcgcggctggcgtcaaatcgattggaagctgacgccgtcgatcgcatcgcaggtgtgggagctggtgcggaggttcgaccagccgcagcggtacaagccgttcgtcaggaactgcgtcgtgcgcggggaccagctcgaggtcggcagcctgcgcgacgtcaacgtcaagaccggcctgccggcgacgaccagcaccgagcgcctcgagcagctcgacgacgacctgcacatactcggtgtcaagttcgtcggcggggaccaccgcctccaggtccgtgctgctgccgcccgtttgttgcgtccctgcaaaaatgctctgtttcacgcgccctccttgcttgtcagtgtactccaaattatttttgggggtatgcttgctttgttaccatttctcttttttttaaattaaattgctttcttgtttccatttcactgcagtcctgatcgctggatgctatgcatgaaatgcatttgctgtgcttgcgagattgggcatttactatgagctttgtgacagttaacatcttggtcctgtttggaagctgggattgggaatcaaatccttacatggtttaggagcatccagtttgaacttaaaccattgtagacatctgctgcaataaaaacaattggcttcggtgagaggcactcatcatcagttcaaacttaaaacgagataagccatcggttgattggcctaattaccttgcttcccgtgattgttcgcctcgctgaaaggatatgctcacaacccgtactgttttgacttgttatccacatactatttaagtacgaaaggacatgcgtactactttcatttgttgttcttcgtctagtcttcagactgataatataaggtgaaaaacttcgatgtttcgcgtgctgtcaagtgattgtgaagcaaagtttctgttagtgtcaatgcgtacaggctgcaatggccatctttactcctacttgaagcatatctctgatccacactgatgatgatgagttgtgtgcgccacttttttttctttttctttcagaactactcatccatcataactgtccaccccgagagcattgacgggaggccgggcaccctggtgatcgagtcgttcgtggtcgatgtgcctgatggcaacacgaaggacgagacatgctacttcgtggaggccgtgatcaagtgcaacctcaattctctcgcagaggtatcggagcagctagcagtggagtcacctacgtcgctgatcgatcagtgaagtcacctgcgtcgcccatcgatcagtgaccaccggtacaaaaaaagacgtcaatcagcaacaaataagaagaagcttcgaaggctggctggagagttcaacctttttgagaccggtggtttggccatcgtcttctgcgtgtaatgtctcttggaatatggaagtattagtcgttgtgtaggattaaacatctgtagtagcttgtatgctagggatggttgtttagccttagaaactgcacctagatacctcatggcatgtatgcatactgctagtatgtgtagagatcagggaaagcatggagcgggttttgcctcttaggtgcatggagatctgtctttttttccccctccattttgcggtggcgactctattggttggggttcttggataaatatactttcccgcgaacgcatagggccggattttggaattggttcaattctcgtaattattgtattctctagtgttattgggatttggggtttggaattgccggactgcgataagtgatgaaaatgtagacattaaagctctcgatgtcagatataatatgttctatgataatactcgatgttagataatactctatgttctgccaaggggacagctacatgtttgagtcggttatatgctttctagcataactaaggggatttgagtcggttatatactttcaagcataactaaggggatatttggtttgagtaatcacttcattcaaattgagatggagtatctatggatggtcaataagtacgagacccgcgagcccgtacgaagcctgctgtttgggcctgatccgagcccggcatggcctggttctatgcgggcccggcctagcacaaataagtggaacaaataagtggcacaaataagtgtcccataagtgtagcattcgatttcataagataaattaaatgcaaataatcaacataccgagatcgaaaccacatatgcagcgattacattaatgttataccattgcacagtgcacaaatataaagagtattaaataatattaaataccattgtcttaaacatagttttaccgaaaactaaactaaggaaacgaaagataacactcctacacagacatattagttttaattaacctaagaaataaaacttctaagaattgttccatcatcatatccaaaccaaaatatatctaatcaaagagagaaaccatgccacaattaactatgatcataattgatatattagttttaattaacactctgtagaagctgtactcttcacccatgagttatgattcctatttgccacatgttgtacaaaccctttaacacttctgg

SEQ ID NO: 478 - protein, 197 aa, Zea mays
MVGLVGGSTARAEHVVANAGGEAEYVRRMHRHAPTEHQCTSTLVKHIKAPVHLVWELVRRFDQPQRYKPFVRNCVVRGDQLEVGSLRDVNVKTGLPATTSTERLEQLDDDLHILGVKFVGGDHRLQNYSSIITVHPESIDGRPGTLVIESFVVDVPDGNTKDETCYFVEAVIKCNLNSLAEVSEQLAVESPTSLIDQ

SEQ ID NO: 479 - DNA, 3193 bp, Zea mays
tattcctacctaatatatcaggacggtcttattaataattctaatgagttatcttggaattttgaatcgaatcaaaaaatctatattatgctcactcaaggaaagtagatgtagataggggcttatatcggtggaggatgacagcgcgccgccgggtcggatccacgcgcctcctcgccggatccgcgtggcttcgccggattcgtgagtcgcctggccggatccgcgcgtgcccgagccggattcgcgagccgccgggctggatccgcacgcctcctcgccggatccgcgcgcgccggcgtgggagaggagagcggcgcgccggcccggatccgctcgacgccggggaggaggaagagggaaggaggcgcggtggccggccggagggaaggaggctggggaggtggaggcaaggcggaggacgaagagcgagcgggtggaggggaggcgagcggctgctgtctgccgcgggggaggcggagtgccgagcggggaggtaggtaggcagggtaggagagtgggaaaaataatataaaacgtgggagttggtatagagttgagatgtagagtaaacatgagcgcagggaattgttgtatagagtagagaatattgctgattaggacgaaatattctttttagagtggatttttagagttgaatgagtgtggatagccttatataaaaccccaaaagtagtggaaacgatctaaaatcttccacgacgtgaccagcacgtggagtcatggacgggacgatacccccgcccctcaaaaacaaaaggtctcgtgggaatcagcgtcatggacagaagatgcttctgccccgtttcttctgccccgttcgcacgttcaagggccacgcacctctccgaaaaatcaaagcacagcctcctgtagctagccctagcttgagtctctcccggtctcccctcacctcacgctggttgcctatataaacgaagatcagatctcgcaccggcgtagcatcacacggggaacacacaaaacatactcctgccgaagcgctgagaagtagctagacaagaataatggggttcagtgaggcacaggaagagctcgtcctccgttcatggaaagccatgaagagcgactctgagtcgactgctcttaagttcttcctcaggtgtgtgatgacactacgtacattcgcgtgcaatttgttttccatggcatgtgtttactctggaaccgtcattttctttcgtgccatgctaaataaataaataaataaaaacaggatctttgagatcgcgccgggtgccaagcagatgttctccttcctgcgcgacgccggcgacgcgccgctggagaaacaccccaagctcaaggcccacgccgtcaccgtcttcgttatggtcagccacctcgatctatctctgtactgtacgcatgtttctatcctcatctagctacctgctgctttgctttaattggcgtccaggcatgcgagtcggcgacgcagctgaggagcaccggcgacgtgaaggtgagggaggccaccctgaagcggctgggcgcgacgcacgccagggcgggcgtcgccgacgcgcatttcgaggtaacttcattaacacgtgtttctatccatggggcgcaatgaacctctgcaagtgcaagctcgatggcacagattatatattccagcgctcgcaagtgtcgtcggttgcagtgagtgagctgtgagcggtggcgattgacagacagagacccaccggtcttgctcgtctttaaacgtgcaggtcgtcaagacggcgctgctggacaccatcagggacgcggtcccggacatgtggacgccggagatgaaggcggcgtgggaggaggcctacgaccagctggccgccgtcatcaaggaggagatgaagaacgccgccgccgccgaggagcagacgaagaacgccgccaccgccgcggaggagacgacgaacgccgccgccgccgaggaggagacgacgaacgccgccgcggctgttgatgcttcctagctcctagcctagcctcctgctacgctcctctgctagcgaccgtggcacgcgcaccgctgcgttaatgggtgtttttggactgctgctggcctgatacctaactacggagctgtcgctaatgctgctgcatttttgtttgtcgaccgcatcatttttgtgatgatgaataaaatattcagaaaaggcccgtcatgcgagtgaaatttgactgaacgtcgtgagaatttaaggccgaaacagtgacatctctagttgtataagtgttggcgctgatttgggcgccaaacactgaaacaaactatctagcggtgctctctgtggagtcacggacactccgcgacatagggtcgtatagtccgcaacttgggcaccggtgcacgcttccgcaaccgagggtcttctttttcgcgaagaacactagaactcaccctcgagagagatcccttcgagggagagagttctaagatattgctccgggtcagcaggtcgcccgacacttctctaatcgatgtagagtcgaagagagattttgtgaagactaaactagatgtaaaactaaggcttgattacttctactcctaaattggaagaacgatgcaaataaggtaaaaattgataaatagttttaattggatcgattgtaaggggcttaaatcggttgtaacccttcgtctatataaagggagggaggtctggacccgttataagtcggttcccgagttaatcctgcaggtttggctaacaaatcctactagaaatctcgaaccctaactgtcggagagggaattctccggccgggtggcggaacgcacccgccataaatcctaagatgaggaggggcctaagcgttttgtctgctgtctagatggatgatgaacacaagaacacacaagggtttagagtggttcggaccgtcggagcgtaataccctactccactgtgtgctgtattaagcttgagagactaagttggatctgccttgtatcgttgtgtgtcttcccttttatagctcaaggggggcacgtacaagggtgctgagccccgacatgtaggcccaggggcaaaagggagggaatacaaatagaagtatccaatgccagtgtcacctagaagatctctaagcgccctaatgtccgtagtccatataatattaatatctcgcggctgcttcctcggtaacgcgcggg

SEQ ID NO: 480 - protein, 191 aa, Zea mays
MGFSEAQEELVLRSWKAMKSDSESTALKFFLRIFEIAPGAKQMFSFLRDAGDAPLEKHPKLKAHAVTVFVMACESATQLRSTGDVKVREATLKRLGATHARAGVADAHFEVVKTALLDTIRDAVPDMWTPEMKAAWEEAYDQLAAVIKEEMKNAAAAEEQTKNAATAAEETTNAAAAEEETTNAAAAVDAS

SEQ ID NO: 481 - DNA, 8143 bp, Zea mays
ctaagtaattaactactactaactagctaacttactgatcatttactagcaatataactaaacaactttaagtttttagtgtataaaaagacacatcgatgcctgggtgggggagtggcccgtgcctgatggtgcagaggctagggcttgggcagagagagcgaaagaacacgccacaactacatgaatgagacttgggcgttaggatctatagcatcagcctcgatgccacgagctatgaaacaaggtattgtcatgttaaggtcacgatgacatctatactatttaagtgtaatacaagttgctataatctaggataccaaaccatatgacatcatcgtcatatatcatcatctcgatccttggaattcaaatgtagtattagcctcatcaaagatataaatgtaaaattttgataaaagaaaatggctaaaaaaatcgtcaccgtgcaccgcacgcaccaactaccccttggcagggcgatgcgtgcgtagacggtttacgagtcattccgtacaaggaaaaagtcatgcggcggtgatgcaggacctcatggggccagactccagaggcgagcatcggatcctatcgcttgctcgcctactcacgtcttgacacctcaaccatgcaggctattcagccatgcaagagctagtacgcagggttcttccagccggccagtgtagtgtagtgtaggtgctcctgtgacactgttcgcgcgtttggtcgctagcttgaggcaaaatctggcataagatttggacacacagtgccaagcacgccacggcaggctagtccaggtagcaactgtagccaaatctgcaatgcttgcacggtactactggctcgtgaacagaatcgagaggggtccgtcgggggaggtttggccactgggcactgaccaagaaagagtgatgactgatgagtgagtgagggtgagcgaggatgctgaactgggctcgccttctttaacactgcgaaatggtggtcccggcggccggtttccaatccaaggatggagtattaacacccctctctctctcactgtcacagacacatccccttggtgctacggccaccccgcgcgctgtacctggtcttggcttgccgtgtttatttatatatatatgtaggcaccccccagcccagctgccgctcaaagcgacaggtggagatcggagggaggaagaagaactgagctgcggatcgagggaagggaacaagcaagcagccagagccaggtcgtggggagccggcggcagtgatcttcttgcgtcgaaggcgaggccggagcgtcggtttgagcgctcgtgcgatatgggggagcaggagaacaacaagatcggcggcagcggcaacgacaacgccatggcggtggacgaagcgggcgcgggcgcggccgcgaacaaggggaagagcctcggcgccgcggacccgcgcctgcaggccatttccgacgccatccgcgtcgtcccccacttccccaagccaggtccgcccccctcgtctccaactccaacgtacaatcaatcattcggttgactcggacgaaccgcacgcgcggcgcggggggcctcgactcgagccctcgatcgggcgcgcgcacggcgggagcacacagttcattcccttctttcgcggccgcgcctcgtgcgcatgcagggatcatgttcaacgacatcacggagctgctgctgcggccgggcgtgttcagggacgccgtggacatgttcgtcgagcgctaccgcggcatgggcatcgcggccgtcgcaggtaagaccgaatcgggaaccgctagccatcattggttcaccatggtaagcggcggagccgccgcctgcctgcctcgcctgcctgcctaactgccttcgccttcccttaatgaccctgcggccgccgctcggtgctgtcgtcaattccgcctgacgctgggggcactgggggctggggcgggcgcggcgcggtggtgttctgagattccgtaatatctttggggcagatcttccgtgctccttttgtccccccacgctttgtcgttcgttcgttgtgatcagccgatcaggtcatgtcatcactcaccaccaccaccactaccacctccccacctacgcgtttctttagtctctcgcctactacagtctactgctcttgctctttacagcaagtaaaaaaaaatttaaataaatcttgcagcagctgcatattctgcacagcagttgggtactaggcgagttcagtgttgatagtaccaagtcctaaaatatgctgataccattctagcagtacggcctcaccatctgacgttctgggccctgggtcataaattcaggggtccaatgccgccgagctcagctgtgacttcatgaggacaggtcgaggaccgtctgctcactagtcactacgtctacgtacgtgcgggcgtgtgcgttggttgatggcaatggtctcgctcgcgtcagagctgggccgcgccgcgccgcgccacggcgtccctgggtttttgtttgccgcggttcggtggtccagcggaatcccgcgcattcaatgcaaggatcggagggcatgtcgacggccgctgattggccgggatcggtcgatccacttcagctcggcgcgatctcatgagtagcgactgtgcgagtgatgcgacacgcctcgtgtgtgccggggcggggcggggaccggcgcggcggcgctggtggtggcggactggcgggcgccgccgcgatcctcttcgaacggctgcggtcgtgcacatgcggtgtcggctcggccccgtcctcggacgccgagatgtggtcacgctttccttgtattttttttgtcctccactcctagtcctagctagtcctgggatctgcgctgcgcatggtctggtctggtctggtcccgtgcgggactctgcatgtgcacagtgacctcctgttggccttgacagctgccaaagtagagcatcgcttgtgtttgtgtggtgtggagtgtggactgtagcgattcgctaggaggatttacttcatcttcttggacacaactggctaggacgacctctattttcatcctttgaattttgacttctcttctattacagtcattattaccgttttcgccttgtcgttactccctccgtttctttttatttgtcgcactatccagcgacaaataaaaagaaacggagggagtactttagaagttacccttttgatcacatgaggaacgtcgtctgagtgttttttaccgagcatgctcaaatgtaacttcatattctcttctcaaacttaatcatcatcatgtaactaattaattcttcatattttgctaggcattgaagctagaggattcatctttgggccagccattgcgctagccataggagcaaagttcataccactacgtaaacctaagaagcttccaggtgatgtgggtggagaagtaaatacaaacaaaacatctataaattagaccccacataattttggtctcgacagtgctgaggaagtggagggcttcggtatcttgaatgtcgtatttgcgcccgtaaactttttaactccgaaaatgaacatgacaacaaatgctacagactgtacaccatactatcatgccatatatagctaccacattggcgaaagcaattacgatatatatggatatgtcgcttttaatttcaccgtgaaacccaatgataccaatatatgccacatggtaaaaagcatgccattggactgttactttgtggaagtatcaatatataaatgcatatttactgtaatttcttcgaaagaaaaccgtaactagctagctagacccatttaattaaaaaaaactagctagagactatttgttagtgtgcagtttcgttacagtttcaacatatagtagtgaatagctgttgcttttataacattacaggtgaggtattttctgaaagttatgtacttgagtatgggatggattgtttggagatgcatgttggagctattgaacccggggagcgcgtagtggttgtcgatgatttggttgcaactggtggaactctttctgctgcaataagacttctcggttagtaccttattacatgccatgtttagtatgatatatatttattggaagctgaccctagctatacatatataccgttcgtttagttttgaatatgatatatatgtgaatgcaaaccttcaactttgtatggttgtttattagcattcgtgctctaaatatgtaataaaatcagcataaaaacccggataggtgtgacacatatattatattcctggttgatgtttattgtctggtagtggtagtactattaataacgggagacctaaaaaaaatactgctattgcacttatatttcttctgacataatccctgtactttaggaactttccccacttgttcacacgtagatgctgttcttacttgtttatggtttggctttgtgcactgtggagtatatcagtgagtattagaacaaaccattagtgcacagaaatcaagcactctgtgctcttcaatcaaccatcagctgctaatttgatcatgtgacaatgcatgtgttctctctcgaaagaagggaaacattttttttccgacatgaaacttaaacctatcactccaggtttcttgttacgaggaaacaatatcttttcaccagtgttctcgatcttagaacgagaaacttaaaggaaaaaaagaagtcatgatgaagagtacagatttataaggtaaaaaggttgattaaggttatacacttgcgtagtagttcagagattgttgcgtaaaaaaggtgtgacgtgtatcttgtggagggcatcatgttcttttgactacaaacgaaatttgtccttaagcgggacaagctgtttattcatcataggacaaagtgttgtctgaatgatatgccctatatggggtagctaataactattggcatgatttcaatgagactggatgcacaacctcatttatttgatgttacaagccaaaagtttgttgataggaactgagcactcatgtctcatataacaagcaaacaagggataccactatgttagaagttttcaactatgttccattcctcttatttttaccaaattaaaaaaaatgttgttttgtgtggactgttgcatgcaattgagcttccagtttcatactagctccatgactgctgaaattctttgcttttccagagcgcgcaggagctaacgtggttgagtgtgcatgcctcattgggcttcccaagtttaaggtaccaaaatctaagttcgttcaaaaaagctaccaaatgtatatttcttttttctcaaggtgcaccaatatgctccttacatgcacttcagttagctaaaggaaattgaggaagtattccatctcggtctgagggaggaaagacgcaatagaacaaggccagtgtaaaaaaaaactagtctgcctgtaactattcctgtacatgtgactgcagatttttaataaatgaaatggtatcatctagccgatatcttttcctcctacgagtaaaaccgagagcaacctcagcgtgtgtttgaaaacaaagtattttaaaaaccatggtgttttgaggtaaagtatctcaaaccatggtattggtatgcatgtgcaagaagctagttattcaccaaaactttgggttggagcaaagtttcaaatacttcaaaaatacatgctcagagttttttacaagtaggcaaacaaccactgtattctccaataacatgattttatcttaaaacaataaaactccaaaaacattttgcttcttaacaccctccttaaggtaaaaaaacttgtggatatcttttgtatgtaacttcagtgacagataggtgcatgtggttagggtaaattattttttgttataagaattatatgcctagtgtgcaatggtgagagctcaccgggacgtggggttcaaagcagcctcttcacatttgcggatgaaggtttgcctcagtttatttcttctccaaatgtcatttgggttttttctttcctaaatcacacatatggaagcgtctggcactggttatgtccttttacgtaggtgataagaatagcctaccttaatttataactttaaataccacgcgaccatgtattttttcctatggatgagatagctgataaccattagccacaacaaaagggatatggctaggttgaactctttggaatctagcatatgtagcaggacttgatatttccagatatgatgatagagagagggttgggaaactacgctagtgccatagtccactcaagtctgcctattcagtaaggatattttagatgcgaggatgactatttttttttaatccaaccttttcttatgaaagagaggcatatcaaggagtgtatatactattccctcatatctactgaggttccattttttttttcaatgtgcaggatttctataagctcaacgggaaaccggtttacatcctggtggagtcccgcaaataggacgcagtaaaatggtcagacaagtaaatgctctcaagctccttttatacttgaaacttctctcaacattcatttcgaacatatcatgaaattacaaagctatgcatgttcgcagaatcgagctttgcacattgagtcaaatttgatttcctggtgaaacaggagcagtagcagcggtagcgtccagccttaaagcatgcatggctactgacactaatttctgcctcgtgaccatttcagaaaaagctttctagcttcccgtccaaagaagctcacagcttcactcatttgcacgcgcaagcaaggtggtatgggggcaccgagaaactccgcagtaatctgtgttgaggccacggccagatgatgctatgtactcctatcttcatggagagggtgatggactgggtgaaacgtagtcactgtacttttgtagcacgtcatgtctagtgtttcttagtagccatggctgaagagagtttgtagcttattcccggcttcctgcagccaggaacatcagtgttagccagagaagctaggaaaaaggatcttatgttgctgctcagttttctaccagaatcgtcttcctttttttcccctttgcagaatcaactctttggtaaactttactaagctcgttttgcctaaacggccgttcaatcatgaagaaagagcaatcatacgtaatgccagcgtaaggaggacatgtcttttttccaatatattactatattcaagctcccagaatcaactctttgataaaatttgcatctaccttggtgcttgtacaccagactagcctaacaaagtgtcgcccctgcacttgcagatggttcccaaaccctatgccgtcgaaccacacttatctactatgtctacgactaatagttagatgacactatggtttctatatattagttgattatacattactatagtttttatatatcatatttgtaaacatttcccatgagtcaatgataggtggagtctatgatatatatataaagttgtaatcttttaatgatatagatccaattatttctttattcaaacacgattttttaattttcaaattattatcatctaccttttatataacacaaagtagcaagagctgtagtggttaaggcgtggggcttagatccttgcatcctgtgtttggatcccacttgtctcattttttttttataattccgggcggctggataagcgccaggtgggagcgacacaaaaaccactgatggcgatgtctaacgttggtctggcacccatctacttaattcttctgtatctgtatgagtcgtgatcatgtgttagattttgcttaagatcctatgtacatttgctatatgtttatgtaccatatgcttatgctaagatcagttttgacacttgcatgtttatcaacgacacgtggaaatggtggaagcctgtcacagaagttcctagcaccctgatccagtgatccctgcattgttccatgaatatcctcctctcacttggagcctgaagggattgaaatcgaatgaaaagatgtacaccaatatatttctccagcaagagcattagctgcattacacggttacaatacaacttgaagcaaatctgaactcaactataatacaggcgaggcatggaccagcgtccggatgcaatg

SEQ ID NO: 482 - protein, 214 aa, Zea mays
MGEQENNKIGGSGNDNAMAVDEAGAGAAANKGKSLGAADPRLQAISDAIRVVPHFPKPGIMFNDITELLLRPGVFRDAVDMFVERYRGMGIAAAAGIEARGFIFGPAIALAIGAKFIPLRKPKKLPGEVFSESYVLEYGMDCLEMHVGAIEPGERVVVVDDLVATGGTLSAAIRLLERAGANVAECACLIGLPKFKDFYKLNGKPVYILVESRK

SEQ ID NO: 483 - DNA, 3325 bp, Zea mays
ttctagaggctacaataaataataggaagttagctgattaactttctataggccataataaattgtaggaagttacgtggctaacttactaagagactacataagcggtagtaagttagtgggttgacagcgctcgactcctagacgacatgaacgagttaacttccgagaggcatagttggctctaggtaactttctagagggctctaaaaagttaaactaacttcgaaccataatttttcgaaagcttaacttctgatgtgatacggtttcgttaacttccgagaatttacggccaacttactgctctacaaagttaaataggctttttagtgtttgtaacatcacgtgtcagcatcagacacgctcaaaaatccatgtataggagatcaactcctgacccatgatagaaaggtcactaatctcgaacttctccactagctgcggttcaggcaaaggtactcctcagtaagctgtcaccatttcaaaaagcaaaaagctataatctataaacaaatacgtgctttcaaaattgtacttctcaaagccattattccgaaaaaaacatctcctgatttttacctcttagtagagttttgattttctcagtgaaaaaaaaaacagctttaaaaacccaacaaaacaccttttattttgagatgtactagcgagtaaacatttttccttccgtaccacgaccatgacacggctctccgccccggctctccgccaatcgtcccatgtgctgccaccttggcgacccgagtgaatccttcacgtacgtgtgttgcactgcaccatttccaaaccaccgaagcgaagcgaccagaagcctgttaccccccaaggccaaagcgatcacggcgaccagcgagacgacgtgtgcggcaacgcgccacctcagccggacacccgtcgccgcgccacccgcctcgctcgaacacgcgtccaaactccaaacccgtctcgcccataaaaccctccgctccccacaaaacccagcacgatctatcacgacgatcagcgcgtatccctgacaaaagcacacagacagctcgtattcgcggctgcaaagctcgagctcagaaagatcagcaatggcgtttctctcgcggtcgaggagccacgctgtcccctcggcgctgctggtgctgctgctcttgtcggtggcctcggcggccgcggtgggcgtggcggccaagacggacgtccacgacgtcgcggaggagagcaacaaggacgaggagtcatggacgggctgggccaaggacaagatctccgaggggttggggctcaagcaccatgccgacgtcgacgaggaggagaccgcgcgcaaggctggccacaccgtcaagtccgcgcgcgagtccgcccagcacaccgcctccggtaagaactccacggtgccccaccattcattcattcgttcttctcgttcgtgctatgatcgtgctgacgccggccaagtccatgctacagagatagggaagaaggcggggtacgccaaggagacggcgggagatgccgcggccggcgcgtcgaacaaggccgggcaagccaaggaccaggctaaggacacggtgaaggacgcggccggcgaagcgtccaacaaggcggagtacggcaagcagaagaccaaggaggccgccgaggcggcgagcgagagtggtgccgaggcgcacgagcggtcgaagaagggcaaggccatggtcgaggagaaggcccgagagaaagccgggcaggggtacgagagcgccaaggacgcggccggcaaggcgcaggagacgctgagccagaccgcggacgcggcggcggagaaggccgggacggccaaggacgcggcgtgggagaaggcggacaaggccggcaagaaggcgcaggagtccaaggaggcggccaaggggaaggcaacggagaaggcggcgtccgccaaggacgcggcgtgggagacggtggaggcggccaaggagaaggccggcgaagggtatgagagggtgaaggagaaggcgcgggagacggcggacacggccaaggagaggctggaggaggtgaaggagagggtcgctgggcccgacgtcgccgccgtcgacggcaaggggaagcaccggagggcggacgtggacaagtaccggtcggagtcggaggacgagctgtgaggagagcccgccgcggcgggtgatgtttgcattcagtgtccaggtcgttttcagcgtgttcaaagctagttttttttttctttcctacacggatctgtatactagtcttctgtttcagcctcgaccatatgctgttcctgctcttagtacaataatctgatgacatgcacacaaacttcgcagaaattcgagttatacgtacaacaacttaatgtcatctattagcacaccaaaactatgcatatgtgatgtgccaacacgacggcatggcgaatattattacaaagtggcctgctttcaaatctaattggaaaaaaaactagtggcatttcccccctcttcaaacctaatcgaagaggattctaattgaaaaaaaaagcgagtgacatgttcctcttcaaatcaaatctaattgaagaggatgcgcatttcttctcccaacccgatcgacatccaccggtttcttcagtccgtcagacaagcagcggggcttccagtgcagtggctctcggagtaaggacggcgaagcaggaggggggatcaggcccgttccgtacctgctcaccgtgttgaggccccccgtctcgccgcagctcatcgtatctgcagcggaagacgacggtgttgcgcccgcccgatcagttgccggccttcgcagcagaaggaaaaacacaaattttcaagcatctctgccgatctcggcgtcacttaccttcgtacgattccagggcaaacagggcgatcccgcagaagatcttgtccaggaagctgagggagcagtagacgaaggcgcagccgttgaggtcctcccctaccagccggctctccagcccaaccgtcgtgagacctgcccatgtaatgtaaagccagagcacgcgaaaccggtaggatttggacgtgcagcgtggcgtgctagctaggcgcccgcgttttaccatgacgagcgcgttggcagcgccgatgaccatggcgagagggtgttgtgcatctggctcgggaagacgaagacggtgacgccggagatgacccagagcgtcgcgccgacggtgaggagggacttgaggcgccggtcgttccacttgatctcctacgttcgaggcaggcaggcagttccagagatgggtgagtgaagggaaggctgaattttgcaatgcagtatattttttagc

SEQ ID NO: 484 - protein, 320 aa, Zea mays
MAFLSRSRSHAVPSALLVLLLLSVASAAAVGVAAKTDVHDVAEESNKDEESWTGWAKDKISEGLGLKHHADVDEEETARKAGHTVKSARESAQHTASEIGKKAGYAKETAGDAAAGASNKAGQAKDQAKDTVKDAAGEASNKAEYGKQKTKEAAEAASESGAEAHERSKKGKAMVEEKAREKAGQGYESAKDAAGKAQETLSQTADAAAEKAGTAKDAAWEKADKAGKKAQESKEAAKGKATEKAASAKDAAWETVEAAKEKAGEGYERVKEKARETADTAKERLEEVKERVAGPDVAAVDGKGKHRRADVDKYRSEDEL

SEQ ID NO: 485 - DNA, 14519 bp, Zea mays
cgatagggcgcgtcagaatagttatgaaggtcggttgttgatcaagttaatgaaggtttgaaactttggactaaatttgagatttatattgaaatagagagtcagatgctaggataacaaaaggacgaacgaattagaaagtgagagatgcaaatgaatctaaacatcccctatttcataggtcgaatgccaaggctttaaatttgaccatttttcatttttttatactcccgacaatttaaaatagctagctcactgtgaaatacaccacgtcgttaaaggtgatcgatatcgaccggttcggtcgataccaactgagccattaaacaagaagacgacaggtaactgatcgatcggtaccgacccaatggttcaatggcccggtcggtagaaccgatggttatcgaccgggccctaattcaacgtcgttggtactatcctgatcaatcgaccattcgatagtatgctacttactactagcaggaccacatcaataggagctgccatattgcatctaggctcgcatgtttaatactctctcggtcctaaaacttaattaattttcgattaaacatacattcattaattaacttatgaatatagttaatatatatatctgtatttattatcatttatttgaatgtgaatagaaaaaagagggttagaaaaaactactctgtcctaaaatataatttgttttagtttttaaatacatttattgattaacatatgaatgtattttgtttatatctattattatttattcgaatatggatgaaaaaataaaactagaaagaactatattttatattctgatgtagagatagtatattttagggcggggagtagtaataatttgattgaaggaaaaaaaatgaaccggggcctgacttcacgctgggcagtgggcactgggcacccaccgggcaccgggggcaggaccacattgagtacccgaaattaatttgctgcctggtgtgggtcaaacactaactcccggttgaccattccaacaggccccacccgctaacggcgacgacgactgcttccccagtgggagacctgcaatcctcagccacctgcccctccccctcccccatctccgttcacctcttcccctcttccctaccttcctgtattcgcggcgtcgagtgccgccgcccttcgccggcgccgagcacggagcaacgcaccaggtacgcccccccctctctcctccctcccttcctgctcctcaaaatcgagcaccgcaaaccaaaccctagtacaagctgtaattattcggatctgacccggttacatggtgcatactaactcggggtttctgcaaaaattatcgggtgtacgcgtgtacactcatgtcctatgctaggtccgcccgtggttccagcggaggtctcgctgattgttgggacttacggatttctcgccttttttttgtttctaaaagtttcagtacctggattcgaactgagagtggattacgaagtcatggcaaggttatgttgcttcggcgccggttgctccgatgtaagtcccacttttgatcggtttccgcgtctttttttttgggccacggatatactagcatctctagaatttttgtcaattacttttgtgtttcaatcactaatacaacaagatactgactttctcctgtttataagtcaaataaatctgaggtttctgttaaggtttagttttttctttatcctttcatcttatagctgaacttgaagtgaagaaaatattatgttgaagtaatatgtagtatgctcctttggcactagtaataacaactagtgaccaatattgacttgttggcatgaaataccattattatgctagcgtctagcgacacgagttgcactaaacataatctctccagtctccacctgtaagcgctccaaaaaaagatgttcatgagctgtcattattcatgaaacttgtgagtaagctaggagctctgcaaattgcaatctggcttgtgttagcacttcagccctcttgctgattgttctgcttgtatgcagttcacggggcaagggtcaatagcatccggtaaagggaaaggctgtcaagggcaagtcaagatctgctatggatataaccttgtaagagggatgacgaatcatccaatggaggactatcattttgccgaacttgttgatgtcaaaggaaacgagcttggtctttttgctatttatgatggtcatttaggggataccgttcctatgtatttacagaagaatttatttacaaatattttgaatgaggtaagttttaagcttttgtttcaacagctcttaatttgctagctgtgtggttatcataaccttgtcattctattttaggaagagttttggacacacacagatagagcgattataaaagcgtatgaaaaaacagaccaagctattctgtcacatactccagatctgggacaaggtggctccactgctgtaaccgccattcttgtgaacggcaggaagttatgggtagctaatgttggcgattcaagagctgttcttttgaaaggtggtgagcccatacagatgtcgatagaccatgatccgaatgttgagcggagtgtaatcgaaaataggggtggttttgtttcaaatatgccaggtttgtcctcattttttactctttaagcacgataccctgatttaattgactggggtgcctttttcgatatttggttcattgtcggaagcatttgaacatgtgaaatacacaatcttagtgaaacattttttatggaatcttattgaatggctattaggtgttggaaaaataaaaggtgtttactagccaagttcaataacataatttatttaatctttactgcaaaacagaagaacaagtctcccttagtggagatagctgtacatacagagagagcctcatgggccatatgggtctatagtagatggaccatcatacacttaacatcccccttcaaactcaaggtggaagtggaggatttgaaacattgagtttatcaagtgaagccgatgctgctcttgagtctgtactttaggcaactgacgctcgtgtcgcctcgctctggcggctcggcggcaaatcctagtcgcagccgccactgcccctccacctcgcctacggccttgccgctgctagagcagggtggcggcgcttcccgtgcgcccctgcaaggacagtggcggcgaggagtgctccccctcgctccgcccctccccaaccctaccgccgtgactcgggcaccagacctggacccaatggggagtaggcggcgtgctgactgtgccggctggcgaggcgacagaaggagcaggggacgattgcctgggcggtgggcgcatggcggtcgtggctagcgttgtcgtcctctagttgggcggggcgggtcagtgtgcaggaggactcggatgcgcaggtgagctcttggcgtggcggcacaaggtgcgggtgcttgagcctcgtgacgtcgtggtggccaggtattgcgccgacgacagtggcttgacgggtttgcacagcggcgcacaacaaatgacatttgtacaccatgcaactactcgacaatgatggtcgttcgtgaatctgtgacgacactgagccttggtttgcacagcggcgctgcccgttggccattggccaaagccatgcccgtttgcgggcagacaacggtgacgcatgcaggcgccactaggggtggtaatggatcgcgatccaaatgtttcttcacaattccttaggagaaaatcccttcaatgccatccaaacttataccaatctctgcaatgccatcagaatttatagcttcccttcaatgtcatcaaatttaaattttaatcccttgaatgtcatcgccgttagtttgaagctaacatcgttagttccatttaaagcaaatccctccaatgtcatcaaaatctataccgatcccttcaatgccactagaaattggttcgatctatttgggttttaaaattttcagaataaaaaatatggaattgaagggattttctcactgaaatatggcattgaagggattttctcgctgatatatctgaaaaaccgatccaagggttttgggtttacatgccctaactactatacgactgtattattaaacttgatcttatgcgtggaaaggagcaagcaaggaagcttgcttagaactgtactaaacatagcttggctaatggccaacgggcagcgccgctgtgcaaaccagggcccaatgtcgtcacggattcacgaacgaccatcattgccgagtagttgcatggtgtacaaatgtcatttgttgtgcgaccgatggagtcgtacactgttcacgtatctagtgttgtacactgttcacgtatggggtcgccagtccctcttactcctgccccacgctttgctctcgtacaggacggtttcctcaccggttgggttacccctgtgggctggataaaatactcatggctcgtcagcttgctcggttcgtggttagcttggctcagttcgtttcaattttgtcacaagctgaggtagcatcttagctcggtttgttaacgagtcagcttgagccaactccttagctcgaatgagctagcatttgtcatcaaaacaaagcatgcacttgtgtttctccagccctacctctaacaagcaaaaaaaatgagtcatttagctatttgtataatgaacaacatatacacgtgacatacaaaattttgtttccccaatagaaaactttgtggttatttgtttatatcgatttgacctattcggtttttcatatttttttccaaaattattaggaagcaaatagaccgaactaatatatcggagtaattttggggtttcaaaaagtatggactgaactttggtctatagattttttattctagaatttttaaaccctaaatagatcgaaccaattttagtggcattgaaggtatcggtatagattttgatgacattggaaggatttgctttaaatgaaactaacgacgttaacttcaaactaacgacgatggcattcaagagattaaaatttaaatttgatggtattgaagggaagctataaattctgatggcattgaagggattggtataagtttggatggcattgaagggattttctcattcattagggccctaaaaatattttaattcaaaaatgaatagagatagagcccgatcctaatccgatccgatccttaaattttctagtgtaaaatttagatcccattgtcacccctaggtgccactcctaccctactgagggtgtcgtccatggatctcccttgtcctccgtgttggcgtcctcgcctcggctttcttggggtttcacactggctagttggccgacaccgagctctggtggttggttcctgctgggttggtgcgtcggtggacgacagatggtggcaacgcgcggcggcttggagatcttcactgctctgttgggtcttcggaggaaactctgcctggattgttctaggcgagcggcgacgacatttcgacgacgtttctccttgttgtccagaagaccttcaatttgggtgtttgtcggcaatgtggaggcctttcgtcactccgcttggctcggtggtgcttgggtctttgtcgctctggacgtctgcttgcccccggtgttcggcgtagtggctccaggttcgtcggtgaagaataagagcttcctcgcgtggggcgtgtcgaggcttggcaatgatgcgcaccgcggtcttccttcttgtgtgccggtgtttgtgtgtaggcgttgtcgagtgtctttgatcgtgtgctgcccgttttgggaagtcggagctactcattctttgttgagctcggcaacgatgactcatgttgggctttttgtgtggagttgtcgttgtctgtggtgttgtggtgggccttccatcgtttctcttctatgcactctgtgtaggttttgagcccggtttttccttaaaattgggtcaattccattcttcttaattgagaatcagagctcctgccaatacattcaaaaaagtatgtgctttagtgaaaaagtcaaccaattgcaactctgagggcacatactgaagagcaatggttttctaatgacaatgagaccgagtaaaaagggctcataaaaaacaatatgctactcattaatagtattatgtgaagcatcaatagcaggctcatcatgattgtccaaggtggtgaactagatggaagaacagtagtgtctttgggacgacggttgagaacatgtgttttaggtggtttggaaaaaggagtgaagtggcagaggtggaggaggtggcggagatgaaggtgttacatttgtaggtgacatgatgaaaatagaagactcaggaatgactgtattggacggagaaggtatgttgacaacaccactagatgaaacaggaggaaggtacggaaattatgtggactctgtgggtgagtacgagggttgagtggaggggttgtgaaagaaaggatggttctcaacaaaggccacatcacgagagatacgatgtatgaaacacaaagaaggatcataacaccgataaggcgataacctttatgctcaaaatatggccaacagattgtgtagtcaacttagtacgctcatgaggtacaagcaaaacataacatgtacatccacaaactcttagatgatcatagctcgtagggttatcaaaaagaacatcacatttgtctgacaattttgaagacggttgtctattgatgagatagacaagtgtagaaacaatttcatcccaaaaatgagaagggacaaaagatgaaatcaaaagtgtattagctgtgcctgtttctataagatgacaatgttttcatttaacaactcagaggtcagagaggatctctcggaagcagaagaacaactctcctttagtggagatagctgtatatatagtagattcttcatacacttaacaactgctagtcaaatgaaaatgtttattgaacaacaccatgtggtactctattccaagtatgttttgatataaactgtacgtgacaattcatatcatatttaataaaaacatacattttatagcaacaaagttgttgctaatggcttaatgattgcatttcaacacgctgtactatgccactttgatgcaatgcaattttataagcacattttcagtattgtatctgatggaaaatattctaccaaagcagcctataatggactatttattggacccactcattttgatcactgggagcgaatttggcattcctgggagcctcctacaacaacaacaacaacaacaacaacaaagccttttgtcccaagcacgttggggtaggctagagatgaaaccccgtatgaaaacctcagagctcaacccccaaagaaaacaggggaaacaaaggcaaaggagaaccgaaaacgacgaaacgggggaacacataaaagagataaaacccacaagaaccagcaaggtctaaatgagcacaagaaaaggtcaaacgattaaggaggaaaagcggaactataaatcaaggttctggcacgtgaattgcacacttccaccccttcctatccacggcgagctctttatcaatattccactccttcaggtccctcttcactgcctctgtccacgtcaaggttggtcgacctctacctctcttcacattctcgggacgcctaattattccgatatgcactggtgcctcttcaggtcttcgttggatatgtccaaaccatctcaaacgatgttgcataagcttctcctcaattggcgccactcctactctctctcgtatgtcatcattccggactcggtctctccttgtgtggccacatatccagcgcaacatacgcatctctgccacacacagttgttggacatgtcgtcttttagtgggccaacattctgctccatacaacatagccggccggattgctgtcctgtagaatttgccttttagtttgtgtggcacccgggggtcgcataagacacccgccgcttgccgccacttcaaccatccagctttaattctatgactgacatcctcatcgatgtctccatccttctgaagcattgatcctaagtaacgaaaagtgtctttcttgggtaccacttgcccatcaagactaacatcgccatcttcataccccatggcactgaaatcacacttcatatactccgttttagacctactaagcctaaaaccttttgcttccagcgtctgcctccacaattccaacttttgtgaaacaccactcctactctcctcaataagtaccacatcatcggcaaaaagcatacaccacggtatatctccttgtatgtcccttgtgacctcatctatcaccaaagcgaaaagataagggctcaaagccgacccttgatgtagtcctatgttaattggaaagtcatcggtgtccccatcacttgttcggacacttgtcacaacattagtgtacatatctttaataagattaatgtactttgttgctactttgtgtttttccaaggcccaccacattacactcctaggtactttgtcataagccttctccaagtctatgaagaccatatgcaggtctttcttttgttctctgaatctctccataagttgtcttagtaagaaaatggcctccatagttgatctcccgggcatgaaaccaaactgattttgggtcacgctcgtcagctttcgcaggcggtgttcaatgactctctcccatagcttcattgtatggctcatgagtttaattccacggtaattagtacaactttgaacatctcctttgttcttgaagattggtactaatgtactccgccgccactcgtcgggcattctgtttgtccgaaagatggtgttgaaaagcttagtcagccatactatcgctatgtctccaaggcatctccatacctcgatagggataccatcagggcccatcgcctttcctaccttcatcctttttagcgcctccttaacttcatattcttgtatccttcgcacaaaacccctgttgttgtcatcgaatggttcgtccaattctattgtagaactctcattccctccattgaacaatttgttgaagtactccttccatctattcttgatctcttcattcttcactaatagttggtttgcttcatccttgatgcatttgacttggttgacatcccttgtcttcctttcacgaatcttggccatcctatagatatccttttctccctgctttgtgtccaaccgttgataaaggttgtcaaaggcttgaccccgggctctactaaccgctcgctttgcagacttcttcgctatcctatacttctctatgttttctgcacacttgtcatgatgtaagcgtttgtagcaatctttcttctcctttttttatcgaatacgcaggagggctgcgtatcattaaattaaagtagagggaaaaagggcctgtggcccgggacaaacagaacacacaacacaaacacacactctaaacacaaacacacacttacccttacaaagcacacaccacacagacacaaacgaccccaacactcccgtcttttagtaggctataaggctttcctttctctatccagggtcaaaaagagagcgcaagttcttggctccagcagaaacccacaatctcatctcatctttaaatccatcctctaaggtattaaggcagggtcgagctccttcaaaaacacacctgtttcgctgcttccaaatactccaagccccaaggattatcatactattaaaccccttttttttgctctttggaatcttggttgaagcctttctccaccattcagcaaaaactgaatctcttctcttaggactcacagaagagagaccaatgggggttaaaatcttatgccaaaactgtcttgtgaagacgcaattagatagaatatgctgcacagtttcgtcttcctggtcacatagaacacaaaattcaggatgctgaagtcccctttttttaagtctgtccgctgtccaacatttgttatttatggccagccaaacaaaggtcttacacttaggcgctgcccagctcttccaaattcttttccagggctcaaaggattctgctccaatgaatagagctttataggcagatttggaggtgtacagaccatcgttgctaaatttccacacatgctgatcatttgaattttgaagttgaaaagattcaattacctcccataattgtagatattgctcaatctcagctagggagagattcctctggatatcttgaacccataaatgagaggtgagggcctgctgcacagtccttacttttttaaacttcatcggaactgcagcagcaataaggggagctatatctacaatagaatacccatgaatccacttatctttccaaaataaagttgaaataccattaccaatggtggtagtcactgctatctgaaataaagcccgggcctgggaagatattttaagatccaggccactccaaggcttcgaaggagaagttttttgtagccaaagccatcgcaattgtagggcccagttcatcttttggagattaggaattccaaggccccctaaatcaagaggccgagagattttatcccaagctacaaggcaattacctcctctagcctcctttcttcctttccacaagaagttccgttgaattttatcaatggctttgataacccatttaggagcattaagagcaataaataagtaaactgggatggcagagaggacagatttgataagagtgattcttcccgcaagatttaaaagctcagccttccatcctggaagcttggcagcaattttatctatccagtgagcgagatccccagcacaaagttttttgcagcttagagggagaccaagataggttgtgggaaaattttttgaggcacatcccaaggtctgaacagccagcgcagtcctctcagtattgcactggattgggtaggagaaacttttttgcaagttagtatgaagacctgaggcaacaccaaaacacctcaaaatttctctgactaccacaaagtccccagaaactggttttacaaacacagcaacatcatctgcaaacattgaaaccctttggctaatgtttctgccagcaagggggtgtaataaaccacactcatctgccctgataaataggctattaagaacatccatgactaggatgaataaaaggggagataaaggatcaccttgtctcaacccacgcttgagatttataggctgtccaggcactccattgacaagaacttgagtggaagatgtccatagcaggttcaaaatcagattgcaccaaccctgcccaaagcctaagtgttgaagaatttccagcagaaatgcccaatgcactgagtcaaaggcctttttaatgtccagcttcaagaaaattgcagggatttttttctggtgcaacatcttggcagtttgactaaccataataaagttatcatgaatacatcttccccgaatgacaggctacaaaaaacgaggtctcaatcatcctgagagatgccccctttgtgaccaagagcctgagactatagatcatctacttgtagggtgtgtctttgagaggaacttctggtttatgctgcttggacaggtcaacctccaaagttttactcctcaggttggagaagaaaatgtcatgcagtggtggaaaagctgcagtgaccagctgcaacagattgctagaaaaggtttcaactctttaattatcctggggctttggacaatttggaaccacagaaatagatgcgtatttgatggtctttctcctaacttggaaacagccatcagaagagcggatgaagaaagagaaatgtgggagctggctggtgccaagcccaagagtttggccctccttactgcctcccggggattggctcgtagtgttttttagtttgtttagatggatcttcgcaggtttgagttttagacctccgtaaaggagtctttgtacctggtctgttttttcagaccttcttttccttcttcttaatataacggggcacagttttcctacgcttttcgagaaaaaagtcaaagcatcactaccatatttgagcagtttatatgaaatatcgtagttgtcaatgtatgtgcttcctctgtggttcaacaatatgtcttgagacttgagagataagtccttactctagtaatgtgtgatggcattactatttattctcataacataaatattagaccagatttctaaacatgatgtcgaagggctgaattttttatataatatttgtcaaccttctgtgcgcactcaacttatattgtataaatgggcagtaagttgctttgggttccttaactttctgtgcgcgctcaactcattagttactgtaacagcataaatattttgggataattgccaaacacatacctgttgcagtgtctaacttgaagatatgttcctgtgtgcacagttgcgcacacatttccgtgatcacgtttttggtagaagtcatatatttgttttacctggaagacaatttgaagctaccatatgttatagtttccaatatattcataattgcagagagatcagattagtaaatcttttggaaactctggttgcaattctcatcctttaataatttgttcgtagataaacatttaaacaaaaccatgtgccttaaaaataagcacaacaatgttatctgaattttttttgttgacagcaattgaatctaacacttgaactttcaggagatgttccccgagtatgtggtcagttggctgtctccagagcttttggagacaggaatctaaaatcactattgagatcagagcctgatataaaaatcgaagacatagatcacactgccgagctacttgttcttgcgagtgacggtctttggaaggtgtggcacgttatttcaaaatttgtcgaaatggccaggatgtagttgaccggaagcatatccatggctgcactcttaatttctttccttttattgaccctaccaggtgatgaacaatcaagaggttgtcgatttggccaaaaggtacaaggatccctatgctgctgccaagcaattaaccgtcgaagcacaaaaaagagatagtaaggatgatatatcatgcatcgttgttcggttcaaggcgtaagtcggtctcgaaggattttcatcgagagcaaaaaaacaagtgaattaggctgcctgacgatggtagtgataatctgatggttgaataatgactggggtgttggatgtaaatgatttgtctgctccaatgtaaagttcatatataagtatgctaggattatttggtttggcgatttcaaaggtacaggtgcgagggcccgagagctactaaatagctaccatctgtaaataatggttatattggatgttgaatttgtaagagtagactgagcaaaagacatctggatagttcctaaaagaacaaggtactctttatgttcagaaagttctacaggtgtgtatgtgcttcagttagattttaaataaatcctagcaaggtggaagaggaatacatagtagcatgttacagcggtaggatggttagattaaaggaacctttgttgaccatagatccttaatgtcatgacccctatatgatttgcgaacctatattagtgagacaaaacttaatttatacttgtacacatatacgctcatggatacagatatgtactcatacacatatcctcgagtatccgctattcgacggatactcactatccgccccactacaatttcaacattcaacatcaaaacaatatttttattataattcaacaattttatcattctaacagcatcaaacaacaatttcagcaacatatcatggatagaaactggaaaatgaaaatttaggatagtgtattgaatccggatggcccacttgtggggatacatattgtcggcgtttcgagacaggggggtccctaagccgacgagtgagtgtgctgcgtgccccagcccagatggatcgagcgcgtgggcgagcgcgaaggggggagaggcgaggtggccggagtcgagcgtgagagaggtggaagtcccgcggccttcgtgttcgtcccgcgcccaggtcaggtgcgcttgcagtaggggggttacaagcgtccacgcgggtgagggaagcgagcggccccaagagagcgcatgtcccgtcctcggtcccgcgcggccaaccttctctaagaaggccctggtcctcccttttatagtcgtaaagagaggatccaggtgtacaatggggggtgtagcagagtgctacgtgtctagcggagggagagctagcgccctaggtacatgccaatgtggcagccggagagatctgggcaccctgctggcgtgatgtcgtggctgtcggaggtgcggcggagcctggcggagggacagctgttggagcggtcgagtccctgctgacgtcgtcctgcttccgtaagagagctgggggccgccgtcgtcatagagcttgtggagcgccatcattgcccctccggcggagctggccggatggga

SEQ ID NO: 486 - protein, 284 aa, Zea mays
MARLCCFGAGCSDFTGQGSIASGKGKGCQGQVKICYGYNLVRGMTNHPMEDYHFAELVDVKGNELGLFAIYDGHLGDTVPMYLQKNLFTNILNEEEFWTHTDRAIIKAYEKTDQAILSHTPDLGQGGSTAVTAILVNGRKLWVANVGDSRAVLLKGGEPIQMSIDHDPNVERSVIENRGGFVSNMPGDVPRVCGQLAVSRAFGDRNLKSLLRSEPDIKIEDIDHTAELLVLASDGLWKVMNNQEVVDLAKRYKDPYAAAKQLTVEAQKRDSKDDISCIVVRFKA

SEQ ID NO: 487 - DNA, 10076 bp, Zea mays
tttctttgttgacactccagtgtcattatttttaaaattattttctatcctaaaaacaactagaaactagtgcagtcgttatttttttctctatcagtctttggcttttgtagaaataagtaagacccaagtaaagttaccattctattctctaatctatcaccaatataagaaacatacaaaatatttacattgatttttttgttattcaatacattccaattaaaatcctgatttgattttctccataaacatttttagcctaaatgacacaaattcaaaattttgggacacattcttatgtttcacacaagggctatcaatattattacatgctaccatgtcacgaaaatatgtttctccttttatattattgcatatcgatattaaactatttcattcttctttgttcacagcatctaatatttttttgtactctgtccggctaacaaacttgattttttaattttattaaaagtcaaactatcttagattcgaccgatctattgaaatgtttagtattatttatggcactaaataggtataccacgaaaatatgttgcgtgatcaatctagtgtacttatttaatactctatatgtcctaaattaaaatttattttaccttttaatagatttatgcaataattaatgtatgtgttccataattgtctaaatttatcatcatctgtttaaatatggatataaaaataaagagttacaacgactaatattttagaactgaggggcagtatacaattattattctaatatataaatttgtttaaactttagattgattgagttttagaaaaaaactaaaatgtctaggttattaggatagattaagtagttatttaattctcttattaaggtcaccgttttaggcagtgcataaatgcacaactgacttatttatatttatagtttttaaaaaaagagtggagtggtactgaaagcacatatccatttatgacaagatcctaaaagacgacacacccggtaaaacaactgcggcaaaactcaccaagcccccaaactgttaacaggtgataaagcttttctctctcttggccggccagtgacatcagacatcaccaactcgtcgacggtagagagagcaagctcttcggcgatttgagaagaatcgaggagcgagcgagcgagcgagcgagagaggaggaggaggagctggggcttgagcctgcgcccgggggccccgggtcacggaatcctaccattaccaaccctagccttcgttgatcgccgtctcaggtcatggcagggccggcgccggatcgggccgccctgactgtggggccgggcatggacatgccaatcatgcacgacagcgaccggtacgagctcgtgcgcgacatcggctccggcaacttcggcgttgcccgcctcatgcgcgaccgccgcaccagcgaactcgtcgccgtcaagtacatcgagcgcggcgagaaggtatcgctctgatcccgttctccctcccctgtggattcgattcggcgctagctgtagttaattaataacccatcgattccacctcacggagtttgcgttccgagggggctattcgatttgggatgtgaatcctttgggtcctgccgcggaccgtatcttcagcccaaggatgacatttatgtgcatttaggttatgtttttgcttgagtgaatatcaactgtggcctgttgctgtttgctccgtctgatacgctggatatgcttactatgctcgaattatagtttgttcctgtggaattttgttgggcgtgttgtatttggggctaagcatttgccaccacaatcattaaacaaacaaacttatgctaatttaatccagtctgcactgaatcggaataataattttatcaccttgtttgctcaagcgaacatcataattttgatatgccacaggatgctggcaacggtggttgtgacttgtgagcttggagttaccagttagcagcatcaaataaacaataccagctagcattcaaacaaagatctatttatttttgtttttcttgaaaataatatttcgcacctgtgacctgcctggggatcgaacgcaggtcacaagcgccacactcacatgctgccaccactacgatctcacaggttatctggtctcaatatttctagttgggtctattttatgcagatttagtaaaaatatgtcctgtaggattagaaatattgacttagttaaccctggaacatgtttccctgttttgcgttgaataaaaagggaagaaagtttttttttattttgaagtaccccctaggcttctaatgtcataccctttttttatccaaacatagcagcaaataatgattactaataacacaggtagctgactttattgggaatatgcttctattccagcatactgcatctacttttaattgagctgagtaatggtgtatgatttggcccaagaaatatgtaatctatctaattggtaaggggggattgcatggttgctccttctcgaggatgcaaccccgttttacccctgtttttctgaagtttgcacgtatactcttttttaaaatgaatagactattcacccctattccgttattagcatttaacggtgttagctcagcctgcaaaaatacgtttatacccttgcaccattgttccttcttttatcaactatttgcaaatttgcctccactttaatattaactttggaatataatgatggcttaaatctgaccataaattttggaaatcaatacttcaactttaaatcaaaaaaatgctgaaaataaattgaatttgacactacatcttgacaaaattgacaacattttaattgtaattttgaaatatttcaattataatatattttcaagattttaatttaaatattgttattctgtcaacatttaatgttaacttcaatttattttcatcaatttagaaatgttattaaattcaaatttgaaatattgattttcaaagtttattgttagatttatatcacaattatattctaaactttcatatcaaagtggcggcgaatttgcaaacaattgataaaaggagggacaatggtgcaagggtattaacgttttttttgtgggctgagttaacactgttaagtgatgataacggaatagggaaaactacctatctctttcaaaaaagggcatacatgtaaactttaaaaaacaggggtaaaacgaagttgtatctccgagtaggggcaaccattcaacgacctcaattggtaatgatgctccataactctatgccacaactaacttctactacttgatgcatgggagtgtatgtcttataaaaagaaattgaaacagtatgtgtctaggacccaacaaaatattgcatgaatttcacaagaccacattatactgggaaaagtttttgcaacttgcaagcctttcctgttcctttaactaatattgaggtagttgcatacttgttatactgtactgtacaagagccgacacgttttgattgcatagcgaggtgggggaaagtggaatccttttgatacactatgaagtagaatacttgtactagtaattccatctcattcagctccatccagccaagcaattgcattgatgtgtaagctctttactgaatgaacatgttttatccatgtgtgtgtatttctaattggaggtacctgtgcattgttttgtaataccattgctttactgttgtggccatatggtctagtagtttttgatagaacaaataatcaataatatcttgaacttctgaaaccaaggatagttgagcagattcttgttacattcctttgattttggcttcaacccctgagagaccaacatcaattcatactaaaagcccaatattgtttatgatctctatcaatagcaagacattgggtctagtttatggaatttcctctctcattcatttggtgatttgatttaaataattccaatgtccatagtgccttaaatctgttttttgtgcattttcttcttctatcataagtgctaggttgtcattttttactgcactcagttgttttatcttggttttctttaatatgtattccgttgtcatgtgcagatagatgagaatgtccagcgtgagataattaaccatagatcattgaagcaccctaacattattaggtttaaagaggtgagttgggattgtgatgctgtttctccccagaattccattgttaaacatttttttattcttctttgtatgtctaggttattttaacaccgacccatcttgctattgtcatggaatatgcctctggcggtgagctttttgagaggatatgtaagaacgtgcgattcagtgaagatgaggtttgtgcttgccactttgttcatctttcttcttgacacatctctttcttgatcctaccaaatgcacatatatatctttccaggctcgctacttcttccagcagcttatttcaggagtaagctactgccattcaatggtattagttattatatagtggcatatcttccatcctattgttactgtttactcataccatgcattgagttgagctgcctttttattcttattttcaagcaagtatgccaccgtgatttgaagttggagaacacacttctagatgggagtgacgctcctcgcttgaagatttgcgatttcggttattccaaggttcttacccatgtcaacttcatcttgttctagcttatatttatgtgaatatgtcaggccaccccgtatgtatcagatatgttgctgagatggatatgcgtgggacacaacatggatacatctccatggagtttcggggaaaaacataaatgagagcaattctgatacatgagtgaagatgtattgaggggctttgtggatacggttcagtccagtaggcctactataacccttgactcacatgcgctgatgtgcaccggcagtcagtgacacgacatgcctgccgctgccgctgcccacctgacttcctgctcgcccagctgcctgcctgcccccaccatgagaaatccagcgttgtttgcacacttgagcaggctgtggctgtggacgcacaccacccacaagatgcacgccggaaattggtgagcacttcacggcactgcaacgagcttcaccacacaccggtgataaatcagcaccaagctggtgatgagttagcagtgattccttccatgtttcgtcttctctcctgtagcctcttcctgccccattcttcgtatcaaatttgaactagaactgaaaggggaagggattggatcagtgatttactcatctcctccaagcctgaagcctcaccctcaagtaaaaagtgatgtacttagttgagtcctccctgtttaactagttttactactgcactaagtgcttatatgttctcactaggttagtacccgtgcgttgcaacgggaacatataataccatgataacttatatacaaaatgtgtcttatattgttataagaaaatatttcataatccatttgtgatcctagcaatacataaattttgttattttaatttagttgtttcactactacattgcaaccatcagtatcatgcagacttcgatatatgtcatgatttgcatggtctcattattggagagcacgtgccacacctgccggtagaagttccgtcgtacatcgttagtcatcaggcacgcaccaccatacacgcttgcttaaacaaaaaatgcaagtgtgtgtttgcgaagagaattaaaggcaggccggcacaaaaggtaccccgacgatggcgagtggtcattgttgtcggtccacctctgctcacctccggtgtcgagatgacgccacaatccttgatataatagtcgtcgaacgcgcgtgatatggtgagtaccgatcactcttggctgggctgccaaatgaagtgcaccccgggctcatcagcgaggtagtacacctggtcgttgcaccaccggatgtgctactcctctacatacatcttgttcgaggacactcacacaacaacaacaatggtcatcattccagcgcacaagaattcatggtcggtcagtagcgacttacatagcaggttaggcttcaggtggatgatgagctagacagcgtgatggcgtcgtcgtaggttgcgatgcccagaacaacccgagagtcgtcgacattggcgacgaccatgaggtccccatgtttgacgatggacagcgcggtgcagccgctctggaccacgtccaagcggcggctgcgccggagcttgccgtacacagcggcgcatgggccatgtaggactgcttccagagttcgaactggcagtcgccaagtttcttctcgtcgtcggtgagcgacgccaacgcgagcgcctcgtgctagtggtgtttgttcggggtttccaagtaagaaacatggattcatctttggcattggtttatgaaaatgatttataagttagatccatggaaaaatattatggagaataaatgttacacatgcaaaaaaagtatttaagttgaaaacattattcaaacaaaagaaattgcatgcaaggctcttctttaaatactactccctcaatccaaaaatataatttaataatctcagtgatacttatctactactacacattgtgcaagggtagcaggtgggcttcgggggagatgtattatatgtttttactataatagatgtagacataaacacacatgtggtgtagtggtagctacaaacacatttatttgagaggtcgcgggttcgaatccccttggagcctgtttttttaatttaattttagctaggcgtgggatgcacgtgggaatgggaatagactttgtgggagggggaatgagaaagacacgtgatagccgggaatggaaatgtgaatgggctttgcagggagggggaatgagaaagacaggcagctgggaatgagaatgggctttgcagtgaggacggaatggcaatggcagaacacggaatggggcagcctaccccttaccgtcttaataggtagtagagattttgattctgcaagtttgactttgaggtttggatggagttgctcggcaagcttggctattggagtgttggctaaatggaaatatgaaataatcagcagaacacaattgcaagaatgcaaggaaatttcaagttcctgctagtgtgttacgggcttttgaattttaatatgccttattatttatttattaaaaatactaaaaacatatctgcatattgttctttaagaaaaatggacatttgtgtatctgcctgatactgatatgctgaattttaatatgccttattatttatttattaaaaatactaaaaacatatctgcatattgttctttaagaaaaatggatatttgtgtatctgcccgatactgatatgcatatctatacctgtgctgcatagtgttcgagtacatgtttctgtgggtttgtggctagcactcattgatgttctattgttctatggcttaatgtttacacgatggtagtagaataatgaatatgatcatagcgttgtcagttttcttttaactaacaataccatgcatttttcattctctgcagtcatctgttcttcattcccagccgaagtccactgttggaacacctgcttatattgcacctgaagttttgttgaaaaaagaatatgatggcaaggtacttgtgctatcactttttttatcttgagaaatgtgtcttgagagttgtgcatacctctgcatcagtgcactgttgttccatatacatgtgccacatgttcttagtggtcagaaaacttccacttatgatttctcttttagtgttcactgtctggttacctcctatatgaggaaagcttctcctcaccgatggatttgtttacgacaaaacagattgctgacgtttggtcatgtggtgtaaccctctatgtaatggttgttggcgcatatccttttgaagatccagaagagcctaagaacttccgcaagacaattcaggttatctttttttttcagcatgggtacaagttgaatgcacaagagtgcacacgtacttctgtcagttatagcacatatgtgtgtgtcctagcacgcacccacctaaactctagatcggctactttctgagtctgcatgtttaacttaatgcattatcctgttttagctaacaactaaactaatggtagtgtcatcttgttatagcgtatcttgaatgttcagtacgcaattccagacaacgtgaacatatctccagagtgcaggcatctaatttcgaggatttttgttggcgatcctgctacggtaagtccttgtatgttgtagtcttgctttgaccttgatatagaaggttcagaagatatgctgttttgagttttgtcatatttatctgattttgttgtattcatttgtcataaattatgcagcgaataacaatccctgaaatccggaatcatagttggttcctgaagaaccttcctgctgatctgatggatgatgatagcatgagcaaccaatatgaggagcctgaccagccaatgcagaccatggatcagatcatgcagattttaacagaggccaccataccacctgcctgttctcgcagtataaatgtcctagctgatggactggacatggatgacgacatggatgatcttgattccgactcagatcttgatgttgacagcagcggtgagattgtgtacgcaatgtgagtaacatctcagcagccatctcagcagtcaaccaaggaaccaatcaggcatgggatgccctgttgtatactctggcaaagggcatgcttccttttgtgaaaaacatccatgtagttttctcaaggaatcgcaatgtgttctgtggaacacatatgttgtagtcaaactcgggttactcagcttgtaaaactagcctcctcttgcttcctggttactgggctttggatactctcaggcttcgacttgtgtgttgctgttaaatatgtataagaaacttctactcaggttgatctgtgaatctggattccggtagtggttttgctcagtgttgggtgtattcccgatttctgcatttcaaactctgatgattaggtcttgtatttaggcggtttctggatttcaaaatttgtgtttttttgtgcaatttacattttcggggtgttaggcactttcatgtttaatttaaggggtgtttggttcccacggagttaatgggctctaaattttacactataaaatctatcgtgttcattttgaactaaagttaattaagggttctaaaaatttgtgaataaatatttgaatcgtgatctattaccacccttattcccaccttgttattcccaccttggcagtgagaaggttgtcatgtctagaatagggatggtagtggggagccgatttctgtgggaaattcctccattagagcttgtttgatatccacaaaatagaggaggatcagagagctaaaatcctctctttatttaattttaaatgagaagtggattttagcctctctaacccctccggtttttggactttcaaactagcccttagaagacggggatggggccaatttaacccctccggtttttggacttctaaactatcttccgcactccgaattatttctaacactaaccccgagcatagtgcatgttcaaagtttgtaaatttcaggtttcgcatattcaccccctctaagcgactttcaataagcaaatgcaacaagaatacgatggttgatgatcatgagaaggaagagaagactatatggaattcccacaataaggtgaagagtaagactattgcatcccttgagaagatgaaggaaaaacttttcaataccaacaataagaagaaaatgctgaacaaaacacaaagcgaaggaggagaataaggaaatgctgaacaaaacacacaaagagaagtaatgggctgtcaacagcaaggagagaaagataacgagtggccacaaaaggttaaacagtggggaagcgtccactgcattctttgggaataaaaagaaagcaaaaaaggccgagtaagacctacaaccaagagctgcaaaggaatgaagatgaagaggaggagatgtgagattatcccagta

SEQ ID NO: 488 - protein, 366 aa, Zea mays
MAGPAPDRAALTVGPGMDMPIMHDSDRYELVRDIGSGNFGVARLMRDRRTSELVAVKYIERGEKIDENVQREIINHRSLKHPNIIRFKEVILTPTHLAIVMEYASGGELFERICKNVRFSEDEARYFFQQLISGVSYCHSMQVCHRDLKLENTLLDGSDAPRLKICDFGYSKSSVLHSQPKSTVGTPAYIAPEVLLKKEYDGKIADVWSCGVTLYVMVVGAYPFEDPEEPKNFRKTIQRILNVQYAIPDNVNISPECRHLISRIFVGDPATRITIPEIRNHSWFLKNLPADLMDDDSMSNQYEEPDQPMQTMDQIMQILTEATIPPACSRSINVLADGLDMDDDMDDLDSDSDLDVDSSGEIVYAM

SEQ ID NO: 489 - DNA, 3854 bp, Zea mays
tgagtccgtagtgtagggattacaaattaatggaatctgcagacgttgtggccgtaatagtaagaactaccattagttgcagtaaatatggaggatattaagcgggtgagtaccatagaaatgtgtaaccctaaaaggcacaccagatccgtggagttctttgaactgcggattaatcgggtcttctaggatgaaatcacttacggtccaaaggattagtgagttggtgtacaaattacttgttcaaatatgcgcgcaagaagaacataaacaataggagtcgaagggcgtacctgaagatccggagatttgggcggagagaagaggaatcgaagcgttgattcccggagccgatgaaggcgtcgatgctcggagcggcaaacgaagctagcgctcgcgaggaacctcgacggagccggatttgcggccgcttcgtcttcgctcgcgactggaggtggttggtgaccaactccacttcgtcttccacagccccgacggggaccggcgcggtcgcaacctttccgcgcacgaatcgccgacgcctcgtccgaaatcgcagacgcctccaacgggacagaagacgaccgcgaaggttccggtcggtggcgcgggcggagtcttccgcgtgaagccgtggaggaggagtgcacagtcgcgcgctgcatctggggtgagagagaagagggtcgcggcggagggggcgcgtagcaacgagcgttgcggcttcaaggggtgaacagtatcccctataccgtctacagtgataggggaggggaggggaaggggggagcgctgcagtcagtctaaggggcccttccccgctcccgccgccaatagggggctcccacctcaccccctcctcgcggctccaccgcacggttcaactgagccgaccccacccgtcaggtccgcgtgcccgcctcccgttggtccgccgagcaccacatcacaccgctacatacaaataaataagcgagacaccggcgcccaacgacttcccaaatcccgtgtgctggcgtgctcgagcccacatcccaaccatatacgagacgagccgacgttcccccgggcccccaaggaaaaccatgtgctgtgcccgccaggtgccactaaatcggtagcgcatgctagcactgagacggagctcccagtaacggcaacaacaagcagcagcagccagacagccagtagtaacacagtaaccggcagaggccatggcgagatcaaggcaggaaggggaggccggaggagaggagcggaagctggtcctgggcaagtacgagctgggccgcctgctggggcagggcaccttcgccaaggtgtactacgcgcgggacctgagcgccgccgccggcacgggcagcaccagcgtggccatcaaggtgatcgacaaggcgcggctgcggcgcatggaggggatggtggagcagctgcgccgggagatctccatcatgcggatggtgcgccaccccaacgtggtgggcatccgggaggtgctcgccagccgctcccgcgtcttcgtggtcatggagtacgcgcgcggcggggagctcttcgccaaggtggcccggggccgcctcaccgaggaccacgcgcggcgctacttccagcagctcgtggccgccgtcggcttctgccaccgccgcggcgtcgcgcaccgggacctcaagcccgagaacctgctgctcgacggggacggccggctcaaggtcaccgacttcgggctcgccgcgctgcccgagcagctgcgccacgacggcctgctccacacgcagtgcggcacccccgcgtacgtcgcgcccgaggtgctcaggaagcgcggctacgacggcgcccgcgccgacctctggtcctgcggcgtcgtgctctacgtcctgctctgcggcttcctcccgttccagcacgacaactgcgccaagatgtaccagaggatcttcaaggccgagtaccaggtgccgccctgggtgtccggcgacgcgcgccgcctcatcgcgcgcctgctcgtcgtcgaccccgccaagcgcgcctctatcccggaggtcatgtgcacgccgtggttcaggaagggcttcgtgccgcccgtcctttcagtttcacccccgatgacgcccaagaaacggctggacggagatgacgacggcggcggtgcgctcttcgacagcagcagcaactctggcgccacctctcctcggtcgtgcaacgcgttccagctcatctcctccatgtcctccgggctcgacctgtcggggctgttcgagaacgaacagaaggccgcgaccgtgttcacggcccgcgcgccggcggccaccgtggtggagaagctcgagtccgcagcgcgcgccctgggattcgagaccaccagggggaagggctggaaggtgaggatggaggctaaggccgggggcacaaacggacggctcgctgtcaccgccgaggtgctcgaggtggccgtggacgtggccgtcgtcgagttcgcgcacgacgccggggacgcgctggacttcaacaagttctgcgctgtggacgtccgtccggggctcgcggaaatcgtctgggcgtggcagggcgacagcccggccgccgtcgttgggaccgcgtgaacctacggccgcccgttcgtcctggcgtccacgcctgttggagccagccttacacggctgcatcggcatcatgtaaagtttccgttgttgcttcgagacagccatggctagttcgttatgagtcgtatgttgtacaggaagagaacaagtgcaaaactgaagagaggtttctgtcgacacgagagccgaatcgagccgggagtgttcgatcggcttgcaaagttttgtagatcatataatcgctattttgtggagatgcgcacatacacaattttgttttggtcgccatatgatttttgcccatctgaatgattgtgccattcgcaattaaatcaaattattactatgtggtttccagagcagctaaggggactgttaataagaatatgcagattcttttggtgtacgttttttttggtgggtggggttcttacttttaagactagtttgagagccacaaaacctaagtagattagagatgctataatcctcttcttaatcagctagaatctcttttttatttacatttgaataaggagaggattctagcttctttaatcctctctggttttgtggctcccaaacgagccttagtatctaggtacgccgatatacggtaagaaattaggaacgagatcctctgacgtgaggagagggcactgccgcgtggcccccgcgtgcgacagggcccgcgtgcagtgaccctactgcccctgcagtacgtcagaggaacctcctccaagaaattacgggacgatgattggatgattatgctggcatccagcggaaattaggagggtgctttcaagccttgttcactcatttccactctatttgaattggatgagataaaaaaaattaagacctcgttcggttacaaggaataaaatctcataatgaatttaattttaatcttaattgtgtgaatccatacctcacacccaatcccttcatagattataatataaacttgtgcaaatatcttcatagatttgttccatacctaatgagccatggatagaattatagcatcatgtcttccatagtttaaaaaattcttaaaacattgggttataatctatgatgggtctaaccaaataaaaaaattaagtaggcttgaattattttggggcatgaattgtgacaaggatttaattccaatccatgataatttaaagttggattggtataaataaacaaggccaaagaaggattgtgacccgttaggattttaagtcactcaatctcgttcaa

SEQ ID NO: 490 - protein, 462 aa, Zea mays
MARSRRREGEAGGEERKLVLGKYELGRLLGQGTFAKVYYARDLSAAAGTGSTSVAIKVIDKARLRRMEGMMEQLRREISIMRMVRHPNVVGIREVLASRSRVFVVMEYARGGELFAKVARGRLTEDHARRYFQQLVAAVGFCHRRGVAHRDLKPENLLLDEDGRLKVTDFGLAALPEQLRHDGLLHTQCGTPAYVAPEVLRKRGYDGARADLWSCGVVLYVLLCGFLPFQHDNCAKMYQRIFKAEYQVPPWVSGDARRLIARLLVVDPAKRASIPEVMCTPWFRKGFVPPVLSVSPPMTPKKRLDGDDGGGGALFDSSSNSGATSPRSCNAFQLISSMSSGLDLSGLFENEHKAATVFTARAPAATVVEKLESAARALGFETTRGKGWKVRMEAKAGGTNGRLAVTAEVLEVAVDVAVVEFAHDAGDALDFNKFCAVDVRPGLAEIVWAWQGDSPAAVVGTA

SEQ ID NO: 491 - DNA, 5590 bp, Zea mays
ggcaacgttagggacggggcatggggggtcgacaccagtgaggtggctcagtggcagggcatgctcggcgcgggcgagtctccacaagcgcgtggtctagcagggcagtctcaacaagcgtggggtgcttgtgcggcggcacatatgtggtgggtagtggtgcggttcggcgttgactagagcgcgaagacacaaaaaaacacgtgaggaagaaagaacacatgaggaagaaagataagtagttgtcctatatacctaattttcgacggtcatacgccaaaattaaacctttaattttagatggcttgcagaaagtcaccgaaagtaaaattttttttcggtggccacgtgtcaattgccgaaaattagattatgtaaacggttttaaaggtgagggggtgaagtaaaccactctctaaaggtcagaagtcatgtaaacttattctataaaaatggatccagcttcttttcaacttatacttttctcgtcctttagctaaaataagatataatatttttttcttatcgatttaatatctgatatgttaaccatatgttccatattaaatttattttttattggtaacaaatatgattgtgttgttcctataaaaagggtttagctccttttgaactcatacattttttggtcttttggttaagataacatataatatttgtttttatcaacttgatatctgatatatgaactatatgttcatttaaatattaaatttattttttttggaaaataaatatgattgtgtgccgtcgcaacacatatgattatactagtaatagtctatggcacacttttacatgtaaatagataatgtatcatatatggatatattataaacgccatgcgaatacggtggcggttaaagaaactttcccgtggaatccgacatggtccggcaatgattgcaataatggaaatggaaaaggacgccggcgcagccgcgcagtgcagcatccactcacagcgggagaggggaccggtcatcacggttgatcgtggcaaatatcaaaatctctcccattccactgcccctaccacagttccactggccttcgcttcgccacggttctcgcctcctcgcattctaaacatcgccatgattcggtggttctgaatgcatctcctgtaaccaccgggcccggagcttctcccaagcccgcgtcgccgtcgagggctgttaacctggcaacactctcaccaaccaacaaacaaacgcgcggggtcgctgtaatggccgccgccgccgccgctgtgaatggtaagcgatcggtccgttgcacgctcatttaacgtttgaattggtttgagataactgtcgagcacatggcgtgcaggttttgtatgagaattgagtcctggagttgactgcggggactgatggtttctggctgtgttgttgcagggagcctagaccgcctagacgtgcatgagaggaaggcgcagaagagctactgggaggagcactctggggagctcaacctcgaggccattatgctcgactcccgtgccgccgaactcgacaaggaggagcgccccgaggtgatttatcccgcgacgatatttttcactcggctttttttagttttagttcgtatgtttgtgattcatcagcttgaacatgactacatgaggacgtgctaatgctcgtgcgatcgtagccttgtacgcttcaaattttgatgtaccggtgcttcttttttgtaggttctgtctttacttccttcatatgaagggaaatctatactggagctgggagctggaataggtcgctttactggtgaactggctaaaacatctgggcatgtttttgcagtggatttcgttgaaagtgtgattaaaaaggtactgaaatttacactcccccgtgatgtaaatattttcagggcttcgtagctgaaatttgatcgttttgtagaatggaagtataaatgatcactatggcaacacgtcctttatgtgtgctgatgttacatccacggacctgatgattgaagcaaactccattgatctgatattttcaaactggttgctgatgtatctttcagatgaggaggtaaggatcaaaccgtacgttagaatcataaactggttcaaggtctatcgctaaagaaaaaacttaactgcaacttttcgtgtggataaggttacatttatcatttgacctgaattgggatatgtttgtcccttccgatttttctaactgtctctcttactgtagattgacaagttggtagaaagaatggtaaaatggttgaaggtcggtggttatatcttctttagggaatcttgcttccatcaaactggagatacagaaaggaaatttaacccaacacactatcgagaaccaaggttttataccaaggtgagaatgcaccccccccccccccccctatgatttcagtcaattcaaatctttctgttcttacccactccactctttagttttcttagattgagtaccagctttctatgaatttgctgataatgtcttttcccatctaggtatttaaagaatgccaaacctttaatcaggatggcacttccttcaaactttctttgattacattcaaatgcattggagcttatgtaaacatcaagaaagatcaaaaccaggtacttctctgtcctcacacctacacatagacttgcgctttcattcctatgaaataagtgattaacatgacttcattgtttccagatatgttggctatggaaaaaagtaaactcatcagaagatgggggatttcaaagttttttggacaatgtgcagtacaaagccactggaatactacgctatgaacgtatctttggagatggctacgtgagtactggtggagctggtgagaggacacatccctttttgtcatttttttgtgatatcgtatgtgcagtgccattaaatgttattattcatcactatgcaccagagactacaaaagaatttgtggagaaactgaatcttaagcctgggcagaaggtgcttgatgttggatgtggaattgggggaggtgacttttatatggctgagaagtatggtacacatgttgttggtattgacctttccattaacatgattatgtttgcccttgagcgttccattggatgtaagtgcttagttgagtttgaagttgctgattgcaccacaaagacatacccagaccacatgtttgatgtcatctacagtcgtgacactatccttcatatacaagtatgctttatacatataatgcatgtagtccttttcttccaagatgatagagctacatcttgatcatatagaatcatggaaactatcttcagttatagatgtacttattagaaacttgtttatgtcatacctttagttgactgtttaactaacatgccttttctggttttgactctgcaggataaaccctccttgtttaaaagtttcttcaaatggctgaaacccgggggaaaggttctaatcagtgattactgcaagagtcctggaaaaccatcagaagagtttgcaacatacattaagcagaggggttatgatctccatgatgtggaggcttatggacaggtggtttttagcttttacctgatcttattttgtgtgcgtggttaatgtttaatacaagtgatttgatctaaaagtacaattccgtttgatgagcaataaacatctgtttcccaaattatctagatgctcaagaatgctggtttcagtcatgtcattgctgaagaccgaactgaccaggtctacccatctaagcatatgcaatctgcatgttcttattcctgtctaatgtctagtaagatgcttggataaacagttttagtgacacactgtgttttgtctttcagttcctcagtgttttacagaaggagctagacaaatttgagaagaacaaagatgatttcctgtctgagtttgcccaggtgattcgataaagcccctaagaagttcaacaataaaaacgcgtagcaaaaataaaaatagcaaaagttcagcaatgaactggctggcgctttagaaacctgcattatttctctgctgctctaaaacagctctaactcttatttttatttgttcccaggaggattatgacgatatcgtgaatggatggaaggcaaaactgcagaggagctctgctggtgagcagaggtgggggctgttcgtcgccaccaagtgatgcgcgtgcgtgtggctttattacaaataacatttggagctctgctggtgagcagaggtgggggctgttcgtcgccaccaagtgatgcgcgtgcgtgtggctttattacaaataaatttgaagctctgctggtgagcagaggtgggctgttcgtcgccaccaagtgatgcgcgtgcgtgtggctttattacaaataaatttgcttctgcaattcaccgatgggattcgcttcataacgtgattttacataactgaactcagagagcctatcctattgctttgtgttttgggacaatgagactgatataacttttacggtcctgttaaatatagagtgtgctgtactgatgctcctcatggctgtggctacatggttgacacgtgacatgagatttgttattttcatatttttttagaaaaatattttgcatctcaacttttgaccaatgtgcatcagatgcattgaatctgtgcatcattttataatttttttaaaacttatgtgtacgtgtttcactagaattacgaagcatcgccattgtactgaacacgagatttacactgaatatgtaccgaacatgtatatttgcgtgccatagttcttttcttcatttttgccaaactatcaaacagtagcggaactaggatttttatatagggtgtgtcgcaacaaaaatttcgtgtagaattctatctaatttatatataatttcataataaatttggtaaacaatttgatatatagatataaagtttgacactcaataaataaacatgaaaattgcatacattaaacataaagattacaataatactacttatatggtctgcgcttcctcaacgccataaaagttttaattatatcttcatcattcacttcgaaaataatggtaatgaaaaagagagataatatctccatgcttctttatatcttagtcactacaaaaataatgatagtgaatcaacaatcaataagacaaaaatcaacaccaatatatatagacatacattgcgttagacaaaattcaacaaaaaaaaaatatctagaccggacttggcaaagttcacgttgaacagcaaaggctggaagcggagaccggggagcctggctgcttgggaagtgggaacagccaaggggcacaacagataaatagccagggccgttcctgacttttgagggacccggaacaagattataaacataggctccaacaccataaaaactattttttactattatatatagtccctccgtttcgttttagttgtcgctggatagtacaaaattgaactatccagcgacaactaaaaagaaacagagggagtatcaactaattatacttgatgtaccacagaaagacttgagcagtaaaaaatataagtaagattattaccttaaatatat

SEQ ID NO: 492 - protein, 501 aa, Zea mays
MAAAAAAVNGSLDRLDVHERKAQKSYWEEHSGELNLEAIMLDSRAAELDKEERPEVLSLLPSYEGKSILELGAGIGRFTGELAKTSGHVFAVDFVESVIKKNGSINDHYGNTSFMCADVTSTDLMIEANSIDLIFSNWLLMYLSDEEIDKLVERMVKWLKVGGYIFFRESCFHQTGDTERKFNPTHYREPRFYTKVFKECQTFNQDGTSFKLSLITFKCIGAYVNIKKDQNQICWLWKKVNSSEDGGFQSFLDNVQYKATGILRYERIFGDGYVSTGGAETTKEFVEKLNLKPGQKVLDVGCGIGGGDFYMAEKYGTHVVGIDLSINMIMFALERSIGCKCLVEFEVADCTTKTYPDHMFDVIYSRDTILHIQDKPSLFKSFFKWLKPGGKVLISDYCKSPGKPSEEFATYIKQRGYDLHDVEAYGQMLKNAGFSHVIAEDRTDQFLSVLQKELDKFEKNKDDFLSEFAQEDYDDIVNGWKAKLQRSSAGEQRWGLFVATK

SEQ ID NO: 493 - DNA, 8792 bp, Zea mays
atactgtttttttccgatcgttttcgaattgttcaagaaccgattagaaacggtacgaaaacgatttagctagtttttcgatcgttttcgtatttttcattttcgagtcgtgctaataccgttttctaccgttttatataatatgagatagatctagcacataatttatttaagttatagacttttgttgtgttcaagtgaatgaatacgcgaaaaacaaatgttataattactctaactattatgaatgatgaaaaagagttgtttgtgtatttctaaatcttaaaaattaggcaatacatcactttattatgtttttgataaaactacaaaatagttatctttccgactatagtttattgttttcgatcgtttccgagtaaccgacacttccgatcctgtattgcgaccatttggtttggttttcgttttcgttttcgtcccgaccaaaaaatataaaaacaaaaacaatttagctattttttcgatcgtttttgaccgttttcatccctattcatgggcctatactgctataccccaccatgcaccatggtccagagtcgagagaggcagaggtgcgcttccccgtgagactgtcttcaacggtgaacgcctccctcccccctcccattctgtagcggcaacaggatccccctatacactgcatcggttcccccttcaatgccctcaataccacagcaggcttctctctccctctccgtcaagcgtgacgctaaatcgtcctcccacctcgctgttgtcatcgagtgcactgccatggacgtcatcgtcccgctccataggttgccgcgccaccgagcagagaaccagtagttgagttagctgtagcgcaatgtatattttagtagcatggtgggatttagagatatggtatagaggaaaccattgcagaaggtgaatatatagggggagagagggtgatgatgtggcatggaaataggatatagggggaaaaatttaggggaaaccgctgtagacagtcccgggcaactggtgggtgtcgtcctcctctttgcgcagcaggttctcgcctccccctccccgcagcttctctctctctctccccccccccccccccccccccccccccccccctccccgccccatcgtcggctaaaggcgatcgtcccacccagaatttcccccctcccccgcaccccccgcaaacatcctagcagccctatcatcgcgccggtcccggcggcctgccggcctcctcgcaccctcccaggtacactccgcacgcggctccccccagttctctcagctctccccgtccaatccagtacaatccacgccgtctcgattggccgacgccgccaagtctgtgtggggtgcgatcggctcgctgggtgatcctgattggagtcgtggattcgttgggtcagatgcaacaggagtggagggggattacctttttttgtcgcgactgccgactggggtccgcgtatgcgggtcggggtggggggagcgcacgtggttagggattgtgaatttgtgatcgcagtacgaaaagctatgtcagactgggtggggtagacgaaccgggggtcatttcaggtcaattattaggtgctgtactatgatagcttcaatcatcttcggatctgccatatcgtgccattcactggtggaatatcttgcttacctcaagggttttaagtcttaatccaataatcagggtcttgtagccgtagggtttatgtcctagcgcgccccccatatatatacacacacacagtagacagtacaatgctcatgtgttgctgcggcacacaaaaataaatattacactttatctttgccaaaaagcctagaattgtctgagttgaaaggagccctgggtggttttcactgcctatctatgtggtaatggaccattgatagggggagaggaataaacctatgcgtttcgcgtttgatacaggacgatcgtcaaaactggtgctttaaagtagtatatatatagaatacgtatgtatgcatatgagccacctggttctgtttagcaaccagatccataattcagaggttcaggtggacccacgtatcattcaatcagtggcaaatttccaactgtatcatcttacagattctgtccataataatatcaaataccacattaatttggatttgtgatgaattgatgatgagatagtaattagatacaaatactactgccttcttttgcagcagtaagagagttactgttatgaataggaatattgttaggaggacggcatatatttttgttgtgggaggtagttgaatgaggctctagacctcagtgcggcttagggccagtttggtagaggactccttcctgaatcctgatgcttcttgattctgtgatgagagtgcttctggtggggaccaaggtggggagcagggtagggagtgattctagattgattctagcagtggttgaacagagagctatggagaatgttttttagctcccagttcgtaataacggagaagtgatttgcatcagctcctcaccagaatctagttgcatttgaactatttcgtagggctcttaggctctgtttgtttgagctgcaactttctaagcttttttgaaaagctgctgctgggcttttgattccgagaagccaacgatagctttttagtgatgttattaccttcctagactcagtaagctatagaaagcctataaaattaggcttctcagcttcccacataaactcagcttttctgagcttctggctttcaggaagctaaaccaaaaagctagctgtttgtttcagcttctggctttttacaccgagaagctggtgagaagctcaaacaaacagggaagaatctcctctgaggaagccgtgagtggagctgtatcaaactggcctttaggtgctgtggttggtcactgcacccaggaggctgggaaggaggaaagggataattgattcaatctctgtttggcttctaaaagtactattcctaggttggcaatgacatctgatgggaaataacaaacctccaaacttagccgtgaagccaaacaacatgctaccaagccaaaaaaaaattctaagcaaactgagatattcaagcatcacacctgtacttggccttatggctctgacgtacaggcttgcaccggggaacctggcctgcctcattgtggagactccacagttcacatgacagttgaggtcagtgcaacgttgtcaggttattatcagttattatagctataatgtgtcggtttctagcttcgaagaaagtatggatggaatgatgctaccttgaccctgacaaaaaaaatatagctgattctttattgcctccattgcaaaagatgttgaacccacattggtcaaagaattccttgcatatgaccaatcaccaaataccactgacactagttatatttggtcagttacattttttttacacgacctcttaataatttacccttatttaattgaacttctccttttctgtttgcagagtaatggattaatgcattaagcaaggtaatgaaatgtaccaaaagtgacttatggaaaagaaacagagcttgttcactgctctgaatgaggaactttaatctgatgcagtctcaaaagagcagagttttgggagcaatgtcatcctctttgcctattctgccaaatcctttgaaagggagcttctcaaggcctcataacccccagcatattcctatgttgaggcagctgcctgatgactctatgcccttgtgtattgacacacatcagtctgctagtttgcacccaagagctggtgttatcggggtaccatattcaggctacactgctagtccacttgattctgtgtctaaccttgatagccagacaatggctgcaccctttatttctcagtcatccaattttgaagctctccagtctctatctaataataccccagaaacacacactaaggcagcctggttcacatcttctatggatgtttcaccactcaacacagataatattgctgcttctgatgttaatcaaatccagagtatacgtcctgctatgacatctgatgagagtgctacacaaaacgattggtgggcagatataatgaatgatgattggaaagatattcttgacgcaacagctactgattcccactcaaaagtatgtgagtgcagaaccataatgagtaaacttgtagctccgtcttctgttcttttagtttagaaatactcttctttattatgacatattacctccgttctcgaatatttgtcgtctactagtgcatttttgaactaaaacacgacaaataaaaaagaactggggagtattaagtttgatactaaacctactggtatgtttgcgcaaatattttatgacattgaaactggagatttttttgctttgcacatactactgtgacagacaactgcaaatgaaggttcccttaccccttatgagaaattgagaagccatagtgttatgcaagtaattaggtctagctcttcagtttttaattgtttaggatgtcttgttgaagtgaccgtgaatatacgataagtgattcccaacatattatttgaatagtgatattgtacatgttagattgaccactagaggtaccatgttagaatcttttaagaacttttcatgttattaacgctaaatggttactgctggaaaattaaagtgctcttgccacatctctttggtacaatataggcgtcagttatctgattttaagatagttgtaggcttgtagtcctgtaattgtctgtgatactagttgtaatgacttatgtttttttttcatgactgttactcccttctgttataggccatgattcaaatttccaactcagctacatcactacctgcagtaaatcagtcagcttcatctcatagtagggagatttgtcctgttgctagtcctcccaatagcagcaatgcttcagttgccaaacaacggatgagatggaccccagaactccatgaatgttttgtagatgctgtaaatcagcttggcggtagcgaaagtatgtctgccctattggcatttcccctcaaatagtttaagttatgaaccctacatcacatcatctaatgcatgtgtttatttatcttttcttattcctattcagaagctactcctaagggtgtgctaaagcttatgaaagttgatggtttgactatatatcatgtcaaaagccacctgcaggtttgctgtttagctttctaagtagtattcttgcccaaaggaggccttttcattttcttatttgaactcgtttgtgttgcagaagtaccgcacagcccgctataaaccagacctgtcagaaggtttatttgcttggcctcttcccaacctattttctctgcgttgtggattacattttgcatgtgaaatgttggggtcatgaagctttcatcatatttatttatttgtgtcatgataaccatgtcgtgaggaattctgtgttgcagacagcatgcatgcatgtagctggatcaaaataagtgtgagttgttagtgttaatattacacttctttaaatcattatgcaggtacatcggaaaaaaggacagccactgaagagctggtcctggacctgaaaacgtgagtgagatacttgccatatgtaatccttcatttcacttgatggtgtgctatttgtctcttttgatggtaactgttaccatgttactgtgtgattccacatgcattgaagcgaagctctggagtttattcacatttgggttatggttttgattgacactcataatttagcttgaaagaaaatgctgtttgagattttcttttaggtgttactgtgaattcttaaggattgcacaaaataaggaggcacttaaatgctttgtattcaaggctaatggaaaacaacattctgcgtgtttgaaccttggtttgtggcttttgttgggtttcaactcttacctactctaacttgcttgggactaaaggctttgttgttgttgtatctggagttctggacatagtgtatatataagtgcatagcaaaagctatgtatttagaaaaactaaaacatattataatttggaatggagtatgaattaaagaaaaatattctttgtacatctcttgaaatgatggcagagtattaaaagtatcgtctttgccattttgattgctaattatttgccaatttatgcatgtgcaattggttgatacttgatagtggtttgaggaatatgctttgttttttgttcataatgatactaaagcgtgtctgggcatgtatggtttgctgtcctagaattgatctattttctgactgttctaagctgacacatttgcatccatcgatttgcattatttcccatgcagtaaagaattttgagggctatgaattacctacaagctatttcaaatctattcttgaagggcctttttacaacagaaatgcttatacaatcatggtctgggatttaacaatagatactccgagcatagatcatgccctcagtgttcgatgcatctgtcaagtgtcaacgccctcttctagttatggaattgtcatgatgtgcattgagccattgcattcacttttgttgcttcttttgaaacataaaatctaatttgaaggttttcctatatgttaaagtgcattttacgatcatcattgtctgttacttcttggtccatgatattgggcattcttgtataggagcatggatcttactgaagcactgcgccttcagatggaagtccagaaacggcttcatgaacagcttgaggtactaattctaaattcagttagtgttgattccacaaggccctgtttggttttcacggattggaggcctgtaacgattcctagtcggattgcttctctaatttatataagttttgataagctggaacgaatccttcctggacacaaacgaacgggccctaagtgattttgcccaacattaatattaatgccaatgaagcttgctttatcctaacactatatatatatatattcctatattgcagattcagcgaaaattgcagttgcggattgaagagcaaggaaagtatctgcagatgatgtttgaaaagcagagtcaatcgagcacggagaaagtccaggatccatcctcaagggatacaacagctaaaccgtcatctaatcagagccagtctacaaacaaggattgtggtgcaaccatggacccaaatggaacaggaggcatcgtacggactgcagaactgggagaacgttcgtctgaattaggtgtaaaacagaaactcgtagagatcgaagaatctggtaccgaagtagccacaggcgacagatctaagatctcccaagagaagcggcgcaaactgcaagatagttaacatatcggttgcactattcagacatagctgttcaaaccgtttgcttggtgaaaaattggtaatctgtgtgtcgaattcgactattgatccgtgagtccattggtgagttgtaccgctcttcagttagccatatatatttataaaggatccaaaggaggaccaaaggagaacttcctggcagccgtctttataacattagcaataagagctatccccgaagttatggggtaaaataaggtcttgaaatttagctttgtttctgaattcctccttttcttttgtttgggttgaagtggtcaccgagtcgatgtagatgaccacatgaatgaatttatcggaagcaagctagtgctgttccctattggcatagaaaccaaatattgaaacacgaacactgtttgatggtgcaaacttttagaatgtaattctgcatcgatttgtttggtggtgttggggtcttcaagaaatgagggagcgatagcagcctcgtataaagcaaatgtaacgactacggtcacttcttatctgtatgtgtatgatggtatatacccgctagagcatataattatggtcctaaatattggtacaacctatccatgtcaacaagctgccttatccataccaacagattagcataccaaagaatccaccaaaatttattgttaacagtttatcagataatatacttgtcaccgtagctagagcaaacttgagagggtttggctgtcttatgggtgtatagacactagatgagggtacatataaagcgaaaatttatgtatttttaggtgtagacgcactccctaaaacgaatatacattcaccccgattatgatacctaactattcgtacattctattcatgtcaataaaccatattatccataccaacatttttttttgtccacattagcactccaaacaatccactaaattttatttttaatagtttatctctttatacaagtaaatataagttgctaatttcatttaaaattatccatgatatccgcaactatgcgcgaggtacggtatccttctagcttttagaatttctcatcttcacaacttatttttaaattaaaagttatatatttatacacaagttttatcataacctttttattagatacattgttggaactccatttgctgtacaacatctttggaaaacttcattgaaataagttctttagcgaaagccatccaacatgtccctagtgaagatcacgttaacacttaagaatatggtacttagtgatgacaagtaaagtttatggctaagcatactataacacaaagaaataatcctagttgtaataactaaggacaaagaagatgtagaaagtgatcatgatgtcatgaatgacttcaatgacctataaggtgctggacttgaagaaaagtctattattattatatttgttatgagt

SEQ ID NO: 494 - protein, 450 aa, Zea mays
MRNFNLMQSQKSRVLGAMSSSLPILPNPLKGSFSRPHNPQHIPMLRQLPDDSMPLCIDTHQSASLHPRAGVIGVPYSGYTASPLDSVSNLDSQTMAAPFISQSSNFEALQSLSNNTPETHTKAAWFTSSMDVSPLNTDNIAASDVNQIQSIRPAMTSDESATQNDWWADIMNDDWKDILDATATDSHSKAMIQISNSATSLPAVNQSASSHSREICPVASPPNSSNASVAKQRMRWTPELHECFVDAVNQLGGSEKATPKGVLKLMKVDGLTIYHVKSHLQKYRTARYKPDLSEGTSEKRTATEELVLDLKTSMDLTEALRLQMEVQKRLHEQLEIQRKLQLRIEEQGKYLQMMFEKQSQSSTEKVQDPSSRDTTAKPSSNQSQSTNKDCGATMDPNGTGGIVRTAELGERSSELGVKQKLVEIEESGTEVATGDRSKISQEKRRKLQDS

SEQ ID NO: 495 - DNA, 3 bp, Zea mays
  misc_feature (1)..(3): n is a, c, g, or t
nnn

SEQ ID NO: 496 - protein, 3 aa, Zea mays
  misc_feature (1)..(3): Xaa can be any naturally occurring amino acid
XXX

SEQ ID NO: 497 - DNA, 2948 bp, Zea mays
aagaaaaccggcagtgctaatgatattttcactggcgattggcaaacaaccgcaagtgaaaaaggccgatttctactagcccctagcactggcggcactggaaaaacgcgagtgcaaatagctctaggaccgccactatagaacttttgtgtactagtgacaggcacgagtagtaacacagtactcaagcaatacaacaatcaacactacactaaaccagggcgaaagagtggacacgagtataactctctgtctcaaaccatctgctcgaattccaaacgattcatcattcggagtgagtctatgtggcatcccttcacgaacacaaattctattgtccactgattatctgaaaccatgatactgatcttttttatttttggttgtcggagtaatttatgtcctttttagtcaggtacaatctttctttcatatcaaaaccagttctttccttgattctttcttttaatgcatgcctttttttgaacttttgaaatgatagaattgacttttcagtgaccactatttaaatttctccttttaagctaagctactgtaagcgggatggacaatagtgatcttcaaacccagtactatatatatacgatcgcatagcctcattgaaaaaaaatctttaatgcgtgttagcattgatctctttgatcaaatggttgtgcattttctcaccaaatttattttatacttcatctgttctaaattatgtagatatagtgtacgtctaaatatatagcaaaatcaacatatgaaaatattagaatggcttataatttaaatcagagagaatatgtcactgcttttcgaagagcatgcagagtggaaatcccatgaatttcaccaatttgatacagcgaaaatgcaattcagattgttctctgcatgtgcttaactgctcatacacgcttccatgcaatgccatacgctgagtatatatacccgtcatgggctcctcccaaacccatagctctagggctgaaaccagcaaagccaacagaactgcacagtgtagtagttgcacataggcgtccgcgcgtcgtcctagctatggatccatatcactaccaaaccatgtatgacccacgcggcttccccatcatccacccgcagccttacctccagcacccggtggccggcgccctcggtgacagcagggtgcgcggcggcggcagtggcgcgcggcggcgtcctggcgccaagctctccacggacccgcagagcgttgcggcgcgcgagcggcggcaccgcatcagcgaccgcttccgcgtgctccgcagcctcgtccccggcggcagcaagatggacactgtgtccatgctcgagcaggccatccactacgtcaagttcctcaagacgcagatcagcctgcatcaggccgcgctgatgcagcacgaggaaggatgccatgctgagctcgccgcctattccgcggtggcggtggttggtgacaacgaggtgacactcgcgtcccatggtcgtaccggcgcatgcgacgagatgatgcagctccaggtggcggcggaggaagctttgagttatggtgttgatgcccatcagccgtacgggctcgatcccaggcagctgagtggtgggcacgagctgccaccgctgcctgcttcttgcatcttcctcgaggagcctgcagacgcatgctactctgtgtgtgacctcgacgacggggacaccggtctgcccggctcttactagagtagtagtagaagtttcttaaggtagcatcccgtgtgtgttggtgtctgctagacgctagtacgtctaattagcaaagtttagctagtactcgatcaattgtctgtctagttcgctcagagttaaagtatatgatgatgcatctgcatatatgggctctgtaattctgttatccgctgatcgcagatgatacaccgtatgtaatcacatgtatgtatgttgcctagctacttcctctcgtgtcgatcaagaatctgatctagctagatggtaaaactatagtgctgcaaactttctgtttttctcattaattaccctctcggtctcaaaagtaatttaattctataattgaacaaaatcaccttgtagtatgtcgtatgaaagactaaaatgactcattttaaatgcagtagtattaagaagggggtgtatctccaaagctagaaattaaaacaaatagcttcgcagttggcttttaaaaagttgggttgtgagaaaaatatgctgggaagttttttttctatcttttagtgtgctaagaagctaaaaatttaataaaaaaacaaaaaagtgaattttgagctgaaactctaaaagctacatctcaaacaactaagccttagggtgtgtttggtttagctttagcttttgccccctaaaaaccaaaagtcaaaccaaagggctgaatctggagaacaactttttctaaaagccgacttacttgtagtgcaaaactgaaagcacctctggacctgcttttagcagtttttaggtggaactgtgaaaatatatatagaagaatttttagcgatttttagtggtttccaccaaacgatttttagcttttagcagttcacagcccacaacagtttttttcacaactcacagcccacaacagcttttttcacagccacagcccaaccaaacagacccttagtcatatatggtcgtgttgatacctttggtaatctttagttaaattagaatataaatcatgtcaatttcatgaaatattagtataagtttagtttgcatactagtcagagataagaaatacaaacataaataccagtataatcatagctcatacactagttagattaaacaacatgaacataaatactagtgcgtgtatgcatagctcgtacactagttattaaccaatataaaccctatgcacgcgtgcataagaaaattaatgatgcgtcaatcagtaccatgaagta

SEQ ID NO: 498 - protein, 219 aa, Zea mays
MDPYHYQTMYDPRGFPIIHPQPYLQHPVAGALGDSRVRGGGSGARRRPGAKLSTDPQSVAARERRHRISDRFRVLRSLVPGGSKMDTVSMLEQAIHYVKFLKTQISLHQAALMQHEEGCHAELAAYSAVAVVGDNEVTLASHGRTGACDEMMQLQVAAEEALSYGVDAHQPYGLDPRQLSGGHELPPLPASCIFLEEPADACYSVCDLDDGDTGLPGSY

SEQ ID NO: 499 - DNA, 4001 bp, Zea mays
tttgattctcatgtttggcgtgacctgttgaacatcagaacgtactataccattgggagacaggttattattcgatcgggtaataaaaccaaattttgggaggacccttggatcgacgaaattcccctggctatgtctgaaccagacctgtatgatgtgtgtaatggtaaatatcttctcgttcagactgttagggagagggatggccagttgactttagaagatggttgaatgacgaaaacagaagtaattgggataaaattatggagaaattccaggcttttgagtttcaagaatcaggagactgtgtctccttgaaatggggcctgagcaaaaaaggagttgcagaatgtactacatgatgggggcaaaacttcttctgaaggctgcgaatgctaggaatgcaggaagagagctgcaagggagcaatgaagctggtgaccagacactggaaatggagtgatcgtcggtcgatgactgctgattggtcgtttggtgacaggagcctccattggctggacggtctttgttatgttgatttctggctgtgcgctgtgtcgcattttgttgcaataatttgactactttctttgggtgatgtcctactacttgatgtcatgttggtagataatgtttggtagctgtcgatgacctgaatcaggtcgattatgtttactttccttgtatgtcggtgcttgattgcttttgcgaccgaaacgtacggttgtatttctgttatgcaaataatagaaatggaggttcttcgtttaaaaaaaaataattagtaccgaaagatagagttttgcatttgcttctataataattttcaaaaaaatataaatattataaaaagtttttaaaattctaattaaatttgagaagctttaactgtagatgaagacgtgtataagaatgtcttgcactgtttataaattagggtttgaaatagaagttgagatagaaagtgaaacgggtgttcgagatagtcttataacttcaattatgacagcggccgccggccagcctgtgtctctctgagtggctcaccgcactgcgccccgtttcagagtggtagcagtgctgcgactgcgtgcacagggtatatagatagataggagtacactgcgtaggagacagcaagagggcgaggctgtgtgtgagagagggggaggcagagaacattcggcagtgtgagaatcggaatcggagatggcttggaatggccgcttcggcgacgacgaggaggggagcggccttgagctcagccttagcctcccgggctacttctccggatcgccaacccaagctgcagcaggtgccgccgcgtccttcatgtgcctcatcacatacgagctagttccatggcttggcttcaattaacccatcgttgtgttctgtgttcgcctggtggtttcaggtttcgaggacaaagcagacggcggctctgctgctgctgctgctgctgggcgagcaaagggaagcaatggcttcaaggccaggtaaccgatgaacctttcattctttctcgccgcctgtgcctttggttgctcctcctttctttttctgaaacgaaacccagaacagagttactgtcgtaacggcgcctcatcatctgaactatgaactacctcaaattcaactcctcaggccggcggcagctgctccggtcgtgggatggccgccagtgcgcgcgttccggcggaacctcgcctcggcgtcctccaagccgtcccgcgatccgccaccaagccacagaggaaacgagtccgcgagcgtcggcgccggcggcaaggccgtcgagggcggcaacaagggcctgttcgtcaaggtcaacatggacggcgtgcccatcggccggaagctcgacctgggcggccacgccggctacgacacgctaaccgccgccgtcgaccacctcttccgcggcctcctctccggtgcgtgcgtgcgcgcgcgcgcatcaccacgcaaccacgcgagttttgtatgaactgacgtctgacgatcgacctctgtctgcctttgccgccagctcaaacgtcgggaccaggcggcgagcggcaggcggtcgcggggatcctgaacggtggcggcgagtacacgctggtgtacgaggacgacgagggagaccagatgctggtcggggacgtgccgtggcagtgagttcgccccctctgcagcacctcaccagatcgcttctcgttttcgcgcgcttgctctgtctgctgacggaccaagctttcttgcgtttttttttcctttttttcaggatgttcgccgccaccgccaggcgtctgcgcgtgctgcggagctccgatctcaacccctcgtcggtcagtggacgctgcgctgaaatctttttgctcttgtgatattgtagcctggagatgttttgtaattttttttctcttgcttttgcagctaagggcagcgaccaggaagagagctgcagcttagtgctgcgctggcgtaccctggagtctcaactctgaacattttgcggccttttcggagggccaccaatgtaaaattgaagcggtttttcgtggatttttgttaccattaccatcatgtatgtgatcaagtagggaagcaggaatctagaggagatgagtggtgttgttagaatcacgtgtctcaacttatctgaaagtctaacaaggtgcctgtttgtttcggcttttgccagcttctggccaccaaaagctgctgcggactgccaaacgctcagcttttcagccaacttctataaaattcgttagggcaaaaaccatttaaaatcaacataaacacataatcggttgagtcgttgtaatagtaggaatccgtcactttctagatcctgagccctatgaacaatttgatcttcctccacatataattgtaatgatactcagattcttcccacagccagattctctccacagctagattttcagaaaagctggtcagaaaaaagctgaaccaaacagccccaaggtgtcttggcgctggagtgtatagttcatacttacatgggctcgccagggcccatgggccatggcattgtgctactgcttgcatcgctctggctcagctaaagccctacccaaattttttttagaaaagagaatattattaatattccagcttcggtatcggttgatacattcggctgtcaaactcacaaacatggggttccacattggaacgaaatcttacattctacaaaggtttcataaatttaagctctcaaactatgctctcaatctatgaaaaaaagaccatccattatttgaaaagatctccatcattgttgtttcaagcacacgacgcccattttacttgaggtctgtcctcctccttctgcaacagtgtccagaaccttgtccaatgtgtccctctaagtgacctgcaagggagtggaaacttgtgcattatcaaaaaccacatcattacgacttaaccatatagcccaacagagggcacatgctccaacccaaatcaggctcttaagtctagaatttaaaccttttagccaagtgccaaacatatgttggatgcacgaaggtggagtaatgttaaatgaaatttgtacacctctccaaacacatctagccatatgacagtcaaagaaaaggtgttgaacggattcatctaagttacatccacaacatttaacacttcctttccactgtttttttgctaaattatcctttgttagaactatgcctttaactaagtaccacataaaaattttaatctacaaaggtagctttaaatcccagatggggtggtttctcgaaacaatgttcggggcgactaaagccctatacatagagctgaccgtaaactgaccttgctggagaagatcccaaacaaacgtgtctcttcgatcagctagactaatagtaaatactctagctactaccttattcaaagcagctagattatttacattaagtgaccgacgaaaagccacattaagttgattatgttgaagaacattagctactgttgcc

SEQ ID NO: 500 - protein, 234 aa, Zea mays
MAWNGRFGNDEEGSGLELSLSLPGYFSGSPTQAAAGFEDKADGGSAAAAAAARAKGSNGFKARPAAAAPVVGWPPVRAFRRNLASASSKPSRDPPPSHRGNESASVGAGGKAVEGGNKGLFVKVNMDGVPIGRKLDLGGHAGYDTLTAAVDHLFRGLLSAQTSGPGGERQAVAGILNGGGEYTLVYEDDEGDQMLVGDVPWQMFAATARRLRVLRSSDLNPSSLRAATRKRAAA

SEQ ID NO: 501 - DNA, 5296 bp, Zea mays
aatactccctatgtcgagctcatcagttactaagaaaaactaaaggttggttggtgctagcttgcttttgccaatgcctcaatggtctgtgtgcatgtatatatatgttaggccttttttttctttactaatacgtacattttcatcgcctggtggtaataaggcaagtaagaccaactccagcagcactggctatcccactccgtatccctattatacacgctctgagtcactatttcgctctccagcagccttcgcatccgtctccgcaaaacacacgcagtgtacctgcactctccttttccacggtttctctctcctctccgcacaagactgcatgcgccccctcctgctcgcgggccccagttgtcatagactgcatgcggagtgcaaatacggagtctgctggaaacggagacggatacggagaggagagagaaactgttggccgtgctaaatacggatacggagagggagtctgctggagttggtctaaatactccaatgacacagctgctcaggttgtaccactccacaccacatgtcgtcattgcatgcatgctagctgccattgataaaaagatagatgcagaaactaaaggggggaaaaaagagagggaggggcatagcaatagcacgtctggctggatggatgggcgtggctttttggacctgcagagggagtgcactcgattgcagcatctctctctacacgtatgttgcccgccttgccctggctagctgcagcaactgcgcctgcagagggcaacgccaaaccgcctgcagactgcagtgcactgctgcctccccctgacgccttttttccccgatcctctcctgcaataatacaataataataatctgattgccctcctctcctctctcaaataatcacgcttggacagcactagaagcactgagctagctgagaccacagaaccacatgggtctactatatatagaagctaggaagtagagaggggatcagtagctagctaaagcttagcccggcggccggccagaactgcaagagagaagaccaagaaacagagagagacaagcgcaggggacagcagcgggtagctagctagctagcgatcgacgacagacgatgcagatgatgatgctctctgatctctcgtctgacgaccacgaggccactggatccagctcctatggcggggacatggccagctacgccctcagccctctcttcctcgcaccggcggcctcggccaccgcgccgctgccgccacctccgcagccgccggccgaggagctcaccaacaagcaggccgcgggcggcggcaagaggaagagaagccagccggggaacccaggtacgtagtagttaattggctgaccaatcacgccgaccgatgcacctaattaatgaatcaatgtgctacaaataaattaaaaccaaaagaccccggcgcggaggtgatcgcgctgtcgccgcgcacgctggtggcgacgaaccggttcgtgtgcgagatctgcaacaaggggttccagcgggaccagaacctgcagctgcaccgccggggccacaacctcccctggaagctccgccagcgcagcagcctcgtcgtcccgtcgtcgtcggcggcggcaggctccggcggcaggcagcagcagcagcagggcgaggccgcgccgacgccgccgcgtaagcgcgtctacgtctgccccgagcccacgtgcgtgcaccacgacccggcgaggtacgtatgcacggtcctgctcctgcatatatgcgagggaatgctagcgacatagcataacatctcatcgatccatccatccatccatccatccatccatccatccatccatccatcagagctctgggggacttgactgggatcaagaagcacttctcgcggaagcacggggagaagcggtggtgctgcgagcgctgcgggaagcgctacgccgtgcagtcggactggaaggcgcacgtcaaggggtgtggcacgcgcgagtaccgctgcgactgcggcatcctcttctccaggtacatctcatctcatgatcaccgtgcatatatgcatggacgacgtgctttgctgtaattgtaaacgctgatcatttttactaacaagcatgctggatataatagcctaaatctctcaccggacggatcgagagaaaacctagctagacgggatcgatcggtccagcaggttgccgccgacgactgttccatcgatcgagcctgttaatttagtcacaaaaaggatcgagcatatgcatgtatatgaactatcttccttcactgaccaacatcatatcatgcatggacctagttaatcagtacatatactcctatatatacatagtttttcaagaacattgggtgattctgaagcaacctaaatatatatagataccaaaaatatatgaagtcatcagcacgatctgcgagtgagtacggttcttgaactcttctgatggttgcaataatactaccaacaaaaatatactatatatttgtcgcccactaatttatttttaaactaaatcgcgactgataaaaaagaaccgatggagtactatatatacaagcgcatgtggccttcatttacaattttagggtttccatgcatcctgtcataaaactatttgcatgatcacatccctatatatatatatatatatatatatatatatatatgcccatagtactactgttgtgaaaaaaccatgagtccctggtcaaaccagtatatgtacatgcaatatgtttattgcatgcatatttgggaatgaacatcctctgcctgcaccaactttatggcagtcgtccatgtggtcatcatgacacattcccttcaaaaatggaacatatataggtacagcatatgaagcaattgaagagtactttaattgtgaaatagtactactgcaagtatatatgtagtagcacaacagtgcaataatgcagtgcattagatatagtagtgaagttaagagttagtttccaaatcttttactagagagatcataaaaaatctataaaaaattctaattcaacttctaatgtatcttatgttaagaaagagatatatataaaaagagtaaattctgtcattagatacatcgttagcagtagtaccactgaatttaattacgtcctacacacacgcgcacacacatgcatgcatgcatctgcatgcttcttttcagtagtgatcacaaaggaaactgacaaaagaacctagctaatcataggacgcagcttttcgtcatcaaagttaaacgaaactttacatgcatggattgcattgagtactcacgcatgtgcacgtcaacacgcgcacacatatacgtatattaacatagtactttatataccaactaattaataaagtcattgactcctctgatcatttgtttagctaattaacccgtttcgtttgatgcatgcatggtctctctggcgtggtcgtgcaggaaggacagcctgctcacgcacagggccttctgcgatgccctagcagaggagagcgcgaggcttcttgcagcagcagcaaacaacggcagcactatcaccacgaccagcagcagcaacaacaatgatcttctcaacgccagcaataatatcacgccattattcctcccgttcgccagctctcctcctcctgtcgtcgtagcggcggcacaaaaccctaataacaccctcttcttcctgcaccaagagctgtcccccttcctgcaaccgagggtgacgatgcaacaacaaccctcgccctatcttgacctccatatgcacgtcgacgccagcatcgtcaccaccaccggtggtctcgcggacggcacgccggtcagctttggcctcgctctggacggctcggtggccaccgtcggccaccggcgcctcactagggacttcctcggtgtcgatggtggcggtcgtcaggtcgaggagctgcagcttccactgtgcgccacagcagccgcagcaggtgccagccgcaccgccagctgcgccaccgacctgacaaggcagtgcctcggcggccggctgccgccggtcaacgagacctggagccacaacttctaggcccgctatatacttcaagctgcattgagactttgagagacgaatgaacggaacacccaaactgcatgcactctagcttgaagagcaaccaaaactggagtagcaagtatggtgcactactgttgttaatttaccttaatttattgatctctgttagttctattttcatttagggcaatgcgggctagctaattaattcgatgtgcacaacttttgatgaatggaccagaaagtttatcttgttgctttttttgtttgattatgtttcgctgagaggcatgtgttctcataatggtatgtcgaaagaaatagatgatatactaatataaccatatcttatatactagtcagtctaaacaacatgaataaagattcaatcaagctagagtagtgacatggttactgatgatgatgctacggagtcatcgataagtggtagtggaggaaaagcttggtgcaactggcgacgaacacgaccgcttaacttggatgaacacgacaactcgtcgtggaagttgagagcagtcatgcaaataacacttgccaaaaaccttattaaatccatcctctatctgtgcaaggttagaaagatgagtgttatggatcgagatctactctccctattggtgatgtgcacgtaaatgctcaggatgaagagggctatgacggcagcgcagcattgagaatggaaaatactattaattgactatctcaagatttttcaaataaagtaggagctctctgatagtagttttagtgtgtcttttttcaaaaagatcggtatatatagggagaactcctgccttcgtagtatcaactagcaatacaatattgattgatgttgcatcatccacctctctactcatagactttaacataaaagaccattagaaaaaaggtattgggtcgttgagatttattagaatttctgtgcatgaacgtaggagaactagatcataaaaactttaacaggatcttcgcctaaaagttctcattgagataattgatgaagatgatacatgaattgaagcatcttgtgttttcttttgtattggatatctatccatgtgattggtagcctggctggctatgtgcagactcagcgggtgcattgactatggtcgtgcacgtgattggtcccttgcgtagaacgagacgagcctgctcacgcgcatgcaacacagttaattttttcagctcccgcttgcacgcgtggggatgcgggga

SEQ ID NO: 502 - protein, 436 aa, Zea mays
MQMMMLSDLSSDDHEATGSSSYGGDMASYALSPLFLAPAASATAPLPPPPQPPAEELTNKQAAGGGKRKRSQPGNPDPGAEVIALSPRTLVATNRFVCEICNKGFQRDQNLQLHRRGHNLPWKLRQRSSLVVPSSSAAAGSGGRQQQQQGEAAPTPPRKRVYVCPEPTCVHHDPARALGDLTGIKKHFSRKHGEKRWCCERCGKRYAVQSDWKAHVKGCGTREYRCDCGILFSRKDSLLTHRAFCDALAEESARLLAAAANNGSTITTTSSSNNNDLLNASNNITPLFLPFASSPPPVVVAAAQNPNNTLFFLHQELSPFLQPRVTMQQQPSPYLDLHMHVDASIVTTTGGLADGTPVSFGLALDGSVATVGHRRLTRDFLGVDGGGRQVEELQLPLCATAAAAGASRTASCATDLTRQCLGGRLPPVNETWSHNF

SEQ ID NO: 503 - DNA, 31929 bp, Zea mays
ccgttttgcccaaacattaccccgcagacttcatcacgtgcacggcgtacggtgcgcttaaaaaagcaaaataaaaataaaaaccccgacgagccgcatactccaaacaatctgatatctttaatgcttgggcaccgctgcacgtggcaccagcacggccgtgcaaattaatttgaaagcaaaacattccgatacaaaaaatgacaacaacgaatctagttagatctatttaaaacaatacctccattctcgaatatttatcgtccactagttcagtttttaacgcgcgcgacaaataaaaaagaactaagaaagtatactactccactaccatcctaatgcctactttgagtaatctagtattgatcctaatccatatgtattaaggtggtttgcagtataacttaaactaatttacatataatccacctcaacacatatggattatggtcaatactagagtatccaaacaaagcttaaggattgtttggtttctaactattttttaatccatccattttattttattttagaccctaaactaataaatacgataactaaaatagaacccaaacacccatagagactaaacaccccctaaaacaagtcttgttctcatatgttagagtcaaacgtttttatttttaataaaacatataaaaataacactaatagttttaatatataaatagaattaatagatggagcgttggtttttttgtgtaataaatttattcgaagatactactgctaatactttggtcgaaaataaatgttatagcgatattcattatagctaccagtagtcgagtggagtagatagaaacaaaaacagataatagctgctgcctgccagcatcttgtcgtcattacttcatgccaggcaaggtgtgtgagagaagccggtttcgaccgtacgaggaaagaccctggcagcgggcccttgcgatgagagatgccgtggggccaggtgggcccgggcacgccgcatcggccaatgccagttcgacagcggcggcggggaaaccatcccggtttcgctataccccctccccctccgatccgtcgcggcagcgctcatcaccgctttaaatccgcctcctcccagcgtctccctcctcccggcctgtcccctcacctccctccccctatctctccaccgccgcagctagctgcgacgtcatgcactcgccggcgccaccgccaccgcatactatctacaattagccagccgtaggcttacctatcctgtgtcaagcaagcctctcgcaagcaacaaggaaggaagctagctagttttatagctgctgtcggcggcggcggctgaagcgacgtgcctgagctaggatttaggttgagatcaggagagggagaaggcggcggcgatggggcgcgggaaggtgcagctgaagcggatcgagaacaagatcaaccgccaggtgacattctccaagcgccgctcggggctactcaagaaggcgcacgagatctccgtgctctgcgacgccgaggtcgcgctcatcatcttctccaccaagggcaagctctacgagtactctaccgattcatggtacgctctcggccccctccgttgcttacgtttcgacactgcccgctgcgtgctgccccatttccaagctgtttgaaactatgaattgaggtgatgcgtaattatctctgttcgaatttgttgagaatttttggaattatggttattgggtagacagacgtacagctctggttatgtgtagatgaatcgaagaggcgtgtagcgtgtcccgttcgtgcgcgcgctatatatatacggggtaattttatgctccgctttcgctggtatggcgttggtactgctctgtttgggggaaatttttgctgccatgctgcatgtgctaattgcttgactaacttgacttctccgcagaacaccaatactatacatctcatctcgcccttattctgcacatctcatcttgtactcagcacccttaatctgcgactggggaagtggggattatatggagaggagtatagtttctgtaatttggatttttctcatccaggcctggcagcatcagtattatttaggttgctgctgcctcgtttcttcgccgaagtgctacttaatttgtgtgactatttcttcgttcttacattttttcttctttctgtgccccttttctgattggcgctacttgtgggcgctccccatggtatggagatacatggaatcgtcaactgccacaagcaactatgctagcttgtctttactctttgctgatgactgacgatgctgagtctgaaccctggtaggacacgctcatatcgaaagcccatgctgcacttaagtttgtacgtagactttgttcatttgatattgttatgtgctacatatcactgttaggttgccatgattttcttgaatgaacagataggcacacgcacgcggattcctactttctttatttattaactaaaggggacctgcctagaaaaaattaaattggataaattaaaaactacttctaactatgttctttaatttctacctagttaaaatttatacaataaataacttatctagattcagaactaaaatttaataggtgtgctaccataaaccgaagtgccgtcaacactcaacaatgaaggtagtgtgcacagacatcaccatccaaagtggcagatgcagaacgacaattcacaggggtcaagaaaatcacgtgataaaatcaagcaagaccctacaggtgttttatagaatttaagttttatatcaatagatacaagttcaaagaagaaaactatataaacaaaagaagcaaacatgttgctaaattcttgttgtccgaattcaagccatctataccttgtcgaatgtcgatctcctcgggcaggggcatcgggaaggggacagtgtcaagtgaactcttcggcagaaaggcatagctcgctggttcaccaagctcgccgtgggtcgaatcgttgcaacaagcaagatcgggcttgatgggcaggctagcgttgcgacgacgacgacgagcaggatgagggtgttgggaaggggttggggtcgggctgcatcgcatatcgggaaggaggcggttgtggtggactggctcgagcgatgtcagatagaatagggccaaacagatagagcgaggactcgaccaagaaggaatggaggatgacggaagtcggaaggagtgacctatccgacgagaagatgcaggacaaggctggtttactccacctaaaacttcatttactgattttctccacctaaaactttattttttctatacttaattctaaatgaacattaggtatagaagattttacaaaattgagaggggcatgatccacttcgcctcctctatagatccgctcctgaccatcactaaggttttcgcccaaagtagccctagtgcaaacgttgggccaaaatgccaaatcccttctcttccatcaccatcgttgttcttgtcctaccagtccacacaagtgtaagatccccttggcccctagggttcgcctgggcatgaggatctccttctgtcggttagtccgttaggagctggaactcaacaatcatgtatgtggattgttgtttggtttattcatttcatgcctccttacaatctcttagatttatagtgctcataagtgagctggcccattaatcaggtgattacaactcaacactctaatccctcaacactctaatccctctttaatcccttataatctcttctaatctcacggcaccgccttacgtgagtctatatcatagatatacaatcgtgacaacaagcctcttgagaggggcatcgacacacctactgcatgcatcagtcgcatagctgtgtaggctgccaccccttccgattccgaccagacatcgcacggaattgattctgccgcacacgtaacaccttcgcatgccaaagtcatcgccggcattggcagtttggcactcagggcgtgtttggattgcttccctgtgcagccaaaccaaagaaaggtcgttgatcgttggcagcgtatatgtttggatgcaagcagattattggcgggccaaaaagacaagcccatcttcttagctatttttgtatgccaaaacttggtggcagcagccaaaatttggctggccaatcatgagcacaggtagctttagcctcaatccaaacataccctcaccgccggccctctagccgccgccaagcgcgtgccctgtcaggcgctatccctgccctgtaggcgttgggtctaaagatgggaatgggggatctgattccgaatctccacggagaattcttccattagagaatcagaaagtttcttctcccacataatgtaaatgggaaaaaaaatcttcgacgggtaaatggagacgaggaaacattcctcgtaactgttccccgtggggacccgttaaaattatatgtgatacgttttcatgcaatagttaatgataaaagtaaataattaacttgtgaagagatcacttattgtataaatatgtttattttgatgtacatataatgatttcttatatctaacaatgagtataagtgacaatattttatattaataacatatgaaatacgttctagttataatttaagcggagatcagatctcgacgggaatttatctctacgagaaacgaggatgattccagcgtaagcgttcagtagattccagcggagaaatttttttaccgcgaggacagagatgagaggctaaaacccgacgaaaatccctcattgccatctttagtcgtgtccgatcgccagagcacttatctggatgctcctggccggcgccagcgccgctgcccccactatggcctggccacaattgcaagcgccgtccgttgccccctggggtgtcggatacggtccccagggcaccggatccagcggcccaggctggcaccgctgccgccgtcatggatgtggaggaagaagcaagatgaaggagctctcccgctatctccttgcctaagccctaagcatgggcattggccgtcgctgctgccgcccaagcagacgaccccgctgagccccacgcagatgacgcgagagcacgacccgtcgcccccctaccgcctgcaccacaaaaacacgaggaagagccccgccgccatcccggctagctgcatggccatgccgacggcctccaacagcagcatgccagcatggtgggagcaactcaggggctcagggccgtgtatttatgctacgcataaaagggtttgctatgtttcattttgaagacacaaagattggcatggaaattagctggacgcctggacctaaccgttctttcatctttattaactgatttttttgtgaacataatcttcagaaaaggaagtatgtatttggcggcttggtgccttgtgctgcgatgctaattctttctcagagtcacggacggaacagggcgaggctagcaggggctgtagccccctgacaatgaaaactttttaaccgttcttaaaaaaaaaatgcataatgcaagaggatcatctttcagttaggtgaaactgtatccgagaaactgatgcttacccaatatgcattcatcctagcacctctagctcgacaacgaatagtagcaccttctctaccagaacctcagttatgttttcctatctattttgatcccatttgcacatatcttgaaaatttcaaatcttcgcagtttcaaatgaaaaatataacagataatgaatgctaattacatgtatgcatctcaatatcacatgtgcgattttatttctactgtttgccattgagtacctatactgaaggtagaacattcaccgtataaatgttcgtgtatgatagtgcacccctttgttctggattacgttgatcagaattttcagttgcagtttttcttattgttgacatggtcctatactcctatacttgtacgagttcgcccaaacttatcttgcagccaactttcaaccccagatgttttttttgcactaattctggtgttctatagtggctttctttatcaacttcttgcaggagcttagctattgcttgggaaaccccaaatgcttttcgtttagttttagtatatatttttatctaaagtggccttttcaaggcctgaagctcagcaaatcattgttactttttgtataaaatttaatggtttgtgcatgtatgcttcatgatttgacaataaaatgggaaccatgttcttactgtaacccgaggaaaataactctatctttctgatatagcctttttgtcgtcattgttatcctcatagtggcgctaggtcatctgttgtatgttggtaacttcatattaatgtatgtagacatagtcatgatggtgtatatttgggtactcgtttactgaaaggacatgtatatagggcatatgcacgatcctttatgtatatagttgatcttctggatatgaaaccaaattggttcatggagatcatcattatttctctcagacaatgctcgacaactctttcacatacctttgtagtgtggctcatcaacttaattctcctgtaattggtacaactttaaatatctttgtagtatggctttatcagcttcatagatttaatttaacaaaaacaaacaatggtaaaggtggaaacatccctacctgatcttttttatgaatgtgttccctgctaactatcacaagtttgtataagataattttatagtaatatccttcaaagttttaagaagatatagtctattcagtcgatatacaaatatgttaactgcgtaggagatgagagaaacttcagtttgtatatgatgatgtcaatattaataagcttttgagatttgctaactaatcgtataatttaattttagttcatacactgttccatggaaattaagtcactacaaacagcaaacgatagttttggaacattaatacaaaatattcattcaaaaacataaaataaattatatagggatgttcaccatagcaatttctgttgtttggagaattttttattttacatcaagattgcttaacatgcttcagttttatctacacagactagtatatatgtggggaacttccacataccagaactgattgaaagagctagatacaatataatgcagtcagaaaggttcataactttatttgacttaatttactttttatgtatcgttgtcttcttaacggttgttcttgacgttgttgtgaatgcgttcaaaattaatgttgtatcctacttctgattattagttgacctgttgaaccaagtacactcacatgtagaaaaaggaacaatctttagttagtctatgcatatatatattttatatatcatatataaatattatattatggtttaagtcttgtaggacataaaggtgctatggtaaatgttacatcaatgaatataatcctaccattctctaccataattatatattgttgtcatgttgtgcatattgtttagttattcatgcttacagtgattcacttccagttttaacttgtcatttccaccttttcacagtatggacaaaattcttgaacggtatgagcgctactcctatgcagaaaaggttctcatttccgcagaatatgaaactcaggtaaattcaatttcctttaggaacatatgaagctgtttttaattgttttataacttcattcaatataacaggctctatttgattcattactatagctttttggcttttgttcatcaaaaaaattcttcatgtcctatcaagttggatcagaagtttaggaacatgggtttacttaattcagcctatattacgcctatattactctgctgccaaaagtggagaatgcttcctataatcctatgtgaaggattttcgacctatcaatgttttgcatagttttgccaagattgtttgttagctaataggctggcaagccggttataatctatggtctcccccaaccagtctgcgttcattaaaaaacgattcatacttgacaacttcatgctagttcaacagatgaccaaattcctgcaccagcagcgtgaggcccatattctcttcaaattaaacatttctaaggtgtttgactctgtgtcttgggcctaccttcttgaagttttgaggaaattgggttttggtcagaaatggtgtgacataattagtgggttgttgacaacctcttcaacaaagattctcataaatggtctgccatgtgagggtcttagacattagaggggcttgaggcaaggtgatcccctttcccctatgctctttattcttgtcatggacgtgctgagtttgctaattcagagagcttcgtcggaggggctgctgcaacccctatcatcatgatctctccagcacaggatttctttgtatgttgatgacgtcgttatgttcctaaagcatattgcttctgatataaatttggtcctcgatatcatcaaactgtgtggtcaggctttaggcttaaggacaaatgtccaaaaaagtaatgtttatcctatttgttctggcgatgatgatttgaattgtgtgcagaatctgctcccttgccctatctcggtatttccatgtaagtaccttggactacctctgtcggtgagaaagctatcaagggtacattttcaacctatagtggaccggggtggctagtcttttgcgaggttggaaggcagagttgatgataagggcaggtagagcaacttgtgtgcagtttgtgatgacaacaaaattgatttatgcatctttggcattagatctcccagcttaggccattaaggcgattgacaagttgcgaaaaggattcctttggagaggaaggaggccaaggctagccattgtcttctagccttgctgaaggttactaaacccaaagatctaggtggacttggggtcagtgaccttcggaaccttactgggttttgtaagcacgatggacatggttacaaaaaactgatcctagtagaccatggtcttctttccccattcatgtgtccggaagtgcgatctcttgtgggagtagtagttgcgacacatcttggggatggctctaacactcttttttggaaggatcactggttgaatggcaactatatccaagtgttagggtaataatcattggattatcagggccaaccctagagggtggctatatagagtttatacatgggccacatgggcttagcctcatgggcctaatccatatactctaacacccctcgcagtctgaacttccgtcgcagcggagttcacagactggactcgaaaagaagtacatcacaccataggatccccccacagactcaactagccactactgatgttgaggctggagcgaaactcgacgaaggtcgaggatagaagacccttggtgaagatgtcggcaaactgagaggtggtcgagacgtggaggacccgaacatcaccgacggcgatccgatctcggacgaagtgtagatcgatctccacatgcttggtccgctggtgctgcaccgggttggtggagaggtagacggcgctgacgttgtcgcagtagaccaacatgctcctggagaggggactgtggagctcggcgaggagctgccggagccacgcagcctccgccacgccgttggccacgacacggtattctgcctcggcgttcgagcgggagacgaccggctggcgcttcgacgactaggacaccaggttaccgcctaagaagacggcgtagccggaggtggagcgtcgagtgtccgggcacccgacccagtcagtgtcggtgtagacgaccagctcggaggaggtagaccggtgaagaagcagctcgtagtcgacggtgcctcggaggtagcggaggaggcgcttgagagccgcgaggtggggctcccgggggtcgtgcatatggaggcagacctgctgcacggcgtaggagatgtccggcctggtgaaggtgaggtactgaagggcaccggcaagactcctgtacctagtggggtcctcgactaggtcacccttggcctcagagagcttcgcctgcgtgtcgactggggtagagcagggcttgcagtcaatcatcttgacccgctccagaatgtcaatagtgtactgccgctggtgaagtaggagtcctgaggggcgaggctcagcagtgacccccaggaaatggtgaagcacgcccagatccttgaccggaaactcctgctgaagcgtgtcgacgaggcggcggagaagtgactgactggaggcggtgaggacaatgtcatccacgtagagaagcaagtaggcagtctttgctccatgatggtggatgaacaaagacgtgtctgacttggcctccacgaagcccagtgtcacaaggaacgtagccaatctggagtgccacgcccaggggggctgcttgaggccatagagagacctattgagccgacagaccatgtcagggcgagaggagtccacgaaccctgccggctgacagtagtaggcggtctcggtgagggcgtcatgcaggaaggcgttcttgacatcgagttggtgaactggccaagagcgagcgagggccagcgagagcaccatgcggacgatggccggcttcacaaccaggctgaaggtgtcgtcgtagtcgacttcggggcactgagtgaagccccgaataacccagcgagccttgtatcgttctagggtatcatcggcccgctgcttgtgcgtccagatccacttgccggtgacaatgttggcgtcgggcggacggggcaccagatctcacgtctggttggcgacgagcgccgtgtactcctcttccatcgcccgatgccagtgggggtccagcagggcggtgcggacggaggagggtaccagagagacctgtgagtccccgggcgtggccgccagaacccggggcggcagggtactagccgcgtgccgcgtcaccatcgggtggacgtgcggcgggtctcggtgaaggagcggtgggtggtacaccggcgtctggacacgtgccgcgggtggccgcgacggaggtgtaggtgtccctggtggggactgggccaccagcggcgccgccggagaagaggtcaccggtggggacgacgacggtgggggcgacagcggtgcgaaccctggcagtggcagcctgcgctggtagacgcgtatcggctgggcaaagcgtgccggagggaccaacggcggcggtcccacggccggcgacgtggtcaccgggggccggtgccgacaccaccgtaggcgacaccaccggacccgggcaaggcaccgggctgggagtagtagcgacaggcggcgagcgagtacctgcagcaagaggaagtataggtggctcgaccaccgtgtcagtcggaaagggagtgaaagatcaaggtcggggtcgggggaaggtggtgtgggtgtggtggagtaaggaaaaaaacggactcatcaaacaccacatggcgagagatgaggacccggcgagaggagaggtcaaagcagcggtagcccttgtgattcggggagtatccgagaaacacacagagggtggaacagggtgctagcttgtgaggagcagtggcagcggtgtttgggtagcaagcacacccgaagacacggaggtggtctgacaccgcccgtggccgccgatgcgcaacttcggtgacgtgagccgcgccaaatccagcaaaggagaggaacagaagagaagcgctcaaactcagataagtttgttgggattctgtttctatttctttcttatccccagatccacaccagattacagcttttatagtcaagctaataaggccggcccactattacaaggctaattagccacattgacaccccaaatcctggcttaacagcccatttacaactccacgcaaatcagcacaaagattaaattgccataccagtagcagtactaacacttgccccccccagaagagcttgattgtccccaatcaagagctgtaggaaaccggttcttcaacacttcatagtcctcccaagtggtaacctcagctggcatattggaccaagtcacccttacttgcaccacaggatgattacccttgttcaccatcctcctttccaccacagccaatggcttaacctctttaacagacagatcaacaagttgtggtaaatcagaaaacaccggagaataattgggagtaaaagccttcagctgagatacatggaatactggatgaatcaaagatgtaactggtaaatccagcttataagcaaccaccccaatcttctgtaacaccttaaaaggaccatagaacttataagccaatttaggacagggtcgactaaccaccgacttctgcacataaggctgaagctttaccaaaacgctatctccaatctgaaactctctgtcagatctatgcttatcagcctggagtttcatcctattttgagcagctgccaacttctccttcagcatggtagcatgtaactgtctgtccgccaacacctcagtcacagaactaggagcaaccccagaaagcataggagcagcagcaaacacagggtcataaccatacaaggccttgaatggagaacaccccaaagctgtgtgatatgaagtattgtaccaaaactcagcaagggccaaccatttcttccaagtattaggtgcctcatgaatagaacagcgaagatacatttccaaacactgattcactcgctctgattgcccatcagtttgagggtgatatgcagtagtaagagccaatttgatccccaaagcctgaaacaaagatttccaaaataaactagtgaacactttgtctctatcggaaaccaaagactttggtgtcccatgcaacttgataacattgtcaagaaacacctgtgccactccaacagcagtgaaaggatgcttgagggggaaaaaatgagcatatttggaatatctatccaccacgaccaaaattgtatcatatccctcagatctagggagaccttcaatgaaatccaatgtaagatcctgccaagccccttgaggcactggtaaaggttgtaggagacccggataatgcaccctttcatgcttagcatgctgacacacctcacattgctgcacaaactgaaacacggctgacttgagccctttccaccagaacaacctcttgatcctttggtaagtggcctcaccaccagaatgtcctcccaccacactatcatgcagggctgaaatcaacttagtttgaagggcagaattgttagctatccagatttgatccccttttctaataataccttgatgtaaagaaaaaccttgctcattaggactggccagggccaattgagccaatagatcttgagcctctttatctgtcacataagcattcaggagttcttgcacccaagctggtttcacctcagtcaccgtgtgaatctgcatcacatgaccaatcctggatagagcatcggcaggcacattgtccttgccttttttgtaaacaattctgaaatgaagccccatcaacttagccatagccttcctctgcatatcagattgcaaaatctgatcatccagaaaactcaaagcctgatgatcagtcttaatcacaaattcagccctctgcaaatattgcctccacctgtccactgcaatgattagagccaaaaactctttttcataaatggagagcatcttattcttagcacccaatgctttacttagatatgccactggtctatcacattgcatcaaaacagcacctatcccatcatcacaagcatcagtctccacaacaaataactcatcaaacctgggtagggccaacacaggagtagtaagcatagccttcttcaacgcttgaaaagcctgatcagcctcaggactccactgaaaagccttatgcttcaacagattagtaaggggttttgcaataatcccataatgtctcacaaatctcctatagtacccagtgagacccaaaaaccccctcaactcagttactgactgaggaacaggccatttctccatggctgctgtcttagcaggatcagtggccacccctgtgtgagaaataatatgtcccaaataaatgagctcattcctcccaaacacacatttgctcctcttcagataaaactggtgctctctcaaagtctgcagcaccatcttaatatgagccaagtgtgtctcccatgtatcactataaaccaaaatgtcatcaatgaaaaccatgacaaatttccgaagaaaaggagccaaaacagaattcatcgcacattgaaaggttgcaggagcattggttaacccaaaaggcatgaccctgaactggtaatgaccctgatgggttttaaaggctgttttatgctcatcaccttcccccattctaatctggtgatacccagcagtaagatccagactagaaaaatatttagtaccagccagttcatccagaatctcttcaacaagaggcataggaaatctgttcttaatggtcaaagaatttaatttcctgtagtccacacaaaacctccaagtgctatctttcttcttaaccaacaataccggagaagcaaacgggcttacactaggaacaataagaccagccttcaacaaagcagccacttgcttctcaatttcatccttgtgaagaggagaatacctataaggtctggaattcactggtactgctccaggaaccaaaggaatatgatgatcatacaccctagcaggaggtaactgagaaggcacttcaaacacatctccaaactcctgaagtaactgctgaagatccccctgctgctgtactccctgatattcagacacttcttccaacaccactaaagcccaaatatcatgccccttcacccatttgtgcaactgggaacctgtcacaggcttcaccttcgcatccccagcctcctcatcaccctgcaacactacctctttgccccctattgtaaacttcaaaaacttttgttcccagtcacattccatagggctatggtatctcaaccaatcataccccaaaatagcatcaaaagcactcaaagttaaaaccctcatatccgtatgaaacaattgtgcaccagcccaccattccaatcctttcaccatagtattactgaccatagtctctccatttgccactttgactgtcacagctggacaaacttgcacagtcaatcccaactgatgcaccacatgactactcacaaaactggtcgaactgcctgagtccaccaacatcaacatcaactgtttctgcactaccgctcgaatcctcatactgttaatactgcctgtaccagctagagcctgcacagataaacgacaacacaactccttaacttcatcttcttgtgccaactgctgtaatgtatcatcagtcagtatctcagacatatcctcagtagccactacatttaactgcagtgctccacgctttgcacatttggcaatatgaccaggctcaaacttttccccacaagcataacataacccattaagtctcctgaaatccctaagttgtcgtgctcttgtgagatctgccccgagtccttggtcatctgttttctggccagccacaggttgtttcacatgcatagacaaccctgaccgttgtccccgaaatttattgcgctccaacacctcctgttgaagctgagccaaatgaatagcacggtccaccgtagaaggtgtttgaacctgcaccacatcctgcaattcatacttaaggccccagatccacaccagattacagcttttatagtcaagctaataaggccggcccactattacaaggctaattagccacattgacaccccaaatcctggcttaacagcccatttacaactccacgcaaatcagcacaaagattaaattgccataccagtagcagtactaacatggtcatagcgcggaggggtaccgaagagtgcctggtgaggagtgggggccgggcacgcagtggaagggagacgattgaggaggtaggtagaggtgtggaggccctcggcccagaagcgtgccggtaggtgtgcctagagaagaagagtgcggatggtgtcgttggtcgtgcggatcatgcgctcagccttgccgttctgggaggaggtatacgggcaagacatccgtaactatatcccgtgggagagaaagaagtcacgggaggtggagttatcgaactcccgaccgttgtcacattgaacgaccttaatggtgaggccgaactgagtggacacccaggcgaagaagtggcggagggtggggaaagtctcagacttggcacgcaacggaaaagtccacacataatgagaaaactcatcaagcaccacaagatagtatttgtagcccgacatactggtaataggtgaagtccacaaatcgcagtgtacaagatcaaatgcatgagtagcatgcgaggaagaagaaaaagaaaaacgaacatggcggcctaattggcacgcatgacaaagatgctcatcaggtgatctagtacatgggatggtggcactacgagtaagctgcatcaaggcatcacgtccagggtgaccaaggcgacgatgccaggtagtagaagatgtggcaggtggcaaaaacagcagttgtgtcaggcgacgaagacgaagaagaggtggcatgcgggagccaaagggtgtagaaggggccggtgctgtcacatctgaggagggggcgccgagttaccgagtccttcacagtaagaccagaagagtcaaactcgacagaacaagaattatcagcggtaaaacggcgaatagagagaagattgtggaccaaagaaggagcgacaagaacatcgggaatgcgaaaatagccgggagcgccggcggcacccacggatgtgataggaagacacgagccattcgccaccatgatggacgaagaaagagaggaaggagggcgaacagaggtgagtataccagggttgggagtggtgtggtaggtagcaccagtgtccgcgatccactcgggacccatcagcggagtcagagtaggagtctagaaggcagcaagggcggccgtgtcccaaccaactggcccagacggtggagcagccggcggcgtgggccacgacgtagcggcaggtgtcgaggtccagggcgacggagaggcaaaggtgaaccctggcggcgaggtgaaccccggcgaacatggccgccgggggacgagcctcagaacctggcccctgtaacggccacatggagatgcgccctgaccacgggtggtagaaggtgggccaaggggcaccctactggggtcccggcgtcggtgcgttgccacgggcaccgccgccggaaccgccaccaccatcgctgccaccacggcggcgacggccaccaccgcccccgcctccgccaccttggcccccgccgccctcgctttgcccggatggacgagggccaagggcagactgtgatggagtaggtggacgggtcggggtggtagccgccagtgctgtcgaggaagacgaggacccgggccggagatcgatgcagcctgagcacctagagtgatctcctccagggcaaggtcgtcgcggacctggaggaaggtagggaaggggcgctagcgcatgatcaacgactggaggtgggtgtagcgatcgctgaggccgcggaggacgttgaggacgaggatgctgtcctccacggggcagcccagatcgccaagtaagtcctacatggtcttcatcttgcggcagtactcactgacgctgaggtccccctagacgaaggtgcggaaggtcgcgtcgaggcggagagcctgggcctcggcgttgcccaggaactggccctcgatggccagccaagcagcccgagcgtgaggaaggtttcgaaggaggctgtggaggtcgacgaagatcgtccccacgatccaggtgagcacgatgttgtcgaggcgcacccacgcggcagtcggcgccaagccggtggggtcgcagaggacgtggtcatccagggcgtagcggcgaagggtgaggaggagtaggtctcgccagcgtgcgtaggacagcgactcgggctccaggacgacagggaccatgaggcgaatgttttggacactcccagcctgaaggtggagctgagccacgagcgggtcagccgggtcatgccagagcaccgtggtggtggtgcggtgcccggttccaacgatcgggacgccgtacacgacgcccatggtgttagaggaggtggcccgccgtcgtgggccacaggcgaggcaaggagttgttccgccgcggcaatctgagcagcgatagcgtcagcggcctcgcgctcgcactcccacatgaggaccgcttctcgcagacgggcctgtcgcgccgcgtgctccgcgcgggcagcggtgagggcagcaacggtgtatccctagtgggagaccggtggaggaggcggctgatcgatgacaggaggcggaccgacaaccagcggaggggggtcggagggggagggtcctccggacctgcaaccccgcgggaactgcattcgccacagcagcaagggcagaggtggtgctcgcggcggtgagggccccaccggtggcgctaggccctgccccccactccggcccaagcgcaggggagagcgggggcgcgcgcgacgtagggggcggccctcccatcggcaacggcggcggtggctccagtgcccacgcgttcgggagaaccgtcacagggtggagcagcggcggcggcgcgggcccaagaggaggagaggggagggaagacgtggaagtaggagggggaaggaggaggtggttgctcgtcagccatggggggacggggtcgcgggcagggcgtctggcggcgcggtggcgcggcgggcgcgagctggaggcgttggcgcgagctggaggcgttggcgacgcggctcagccggctcagggtcgcgggcagggcgcctggcggcgtggcgacgggcggtagagaggcagcggcgcctggagggcagggaaggaaaccctagccggcggcggctgtggggtgagggaggagcgaaaccctaatctgataccatgttagggtaataatcattggattatcagggccaaccctagagggtggctatatagagtttatacatgggccacatgggcttagcctcatgggcctggcggcgtggtggcgggcggtagagaggcggcggcgcctggagggcagggaaggaaaccctagccggcggcggctgtggggtgagggaggagcgaaaccctaatctgataccatgttagggtaataatcattggattatcagggccaaccctagagggtggctatatagagtttgtacatgggccacatgggcttagcctcatgggcctaatccatatactctaacaccaagactttgcacctgcgttattggggctggttcctagacgtctggttgattccttgaaggtccaagatgctctcccaggttttcagtggatggcaagcttgagaggtgcactttctgtaagagttattgctgagtttcttgacctttgtgaagctttagaaggtatggtgctacaaccgggggttcaagaccaacatatctggaagtttgccggtttcaggttccttctcaaattcagcttatatggctctctttcaagttctgtggagtttggatcggctgatagggtatggaagtcatgggctcctagaaagtgcatcaacatcaacatagctttttagtcccaagcaagttgggggtaggctagagttgaaacccaacaagatgtcaccaaaaggagaaagagagagaaaggggaggggaaaagcttttgagagcactaaaaggaaaaaggcctaatcacggttcaggcacgtggatagcttctttccaagcacttctatccaaacacaactccatggggatattccattccttcaagtcccttttgattgcctcctcccatgtcaagtttggtcgacctctacctcacattattgtcccgtcttatgacgcctctatgcatcggtgcctctgggggtttagggttaatttttcatttaattagttcagcatgacaaatgttggataactgatagacttgccaagcgaggtctcgaccattcggagaggtgcttgctgtgtgatcaagcagctgaatcaatcaatcatttgctagttggatgcatatttgccaaacagttttggtttgaattattgaagattggatgctggcaaggcctttgtcttctttcgagtcatggtggatgagttacaattccagagtggttgaggcggcggcaaggaaagacttcaactctttggttattttaggagcttggattatctggaagcataggaacaggtgtgtgttcgatggctgcagctcgagtctggttgcggcctttcaggctgctaaggaggaggctatcctttggactctatctgagatcaaagctttgtctttccttcggattgatgagctccgagtctagctgtgtggtagagttttaggcctagctagtgctgagttgtctgtagaatccttctccgatgtgtgtgtgtgtttttgtattctaaattctggcctccgtgaggaggttttcttgtacttggtccattttggacctctattttctcctgcttaatattattgatgcgcagttctcctgcgtattccaggaaaaaagatttggatcagaagtatgatttttcgtgttgatcaagttgtactgaacaaacgtatttgtgcggtcttgcacaggatgatttttagtaagtgtttttgttggtaagattgtttcttgagttaaaagggcatgaatctaacggtcagcacctacaggtgttgatgtgggtgtattatatgagtctttaccctcctcctcttcttaatataaaagatacgcaactcttctgtattaggctatggccagtagatcgtgtatatggccgtataaaacattgttttacactatatgctgcactgtttatatagtggagtttgaaataagagatgatgggtatgatattagagatagctttagagaaagaaaaaaattatccctagcgcttcattacttcttttaccaaacaattatatatactccataaaggagcagtaatgagccttttcactgagccaaaaatattgtgttcgacgtagcatctatataaaatgcacggataaggtttgtctcgattatttctttcctagaccccgctcatacgatagccgctaacaatggatctatcctttatataaatgcaccattcacacaataaattcaaatgtgatgaaacaagatgaaggccaagtcagctaatgtgtattagcattttagatgccatatgtaaccggagcacatgatggcaaggtgttttgtagtgaagagaaacatatagaaggcgcaacaagaatataactatatttgcatagattgaaagttaaattaatcaagtttagttaacttgtattggaattgtccattcatttgcaactttcaattcttagaataattactaaaaaggtaaaccggttgaagtatgcaataaaaaacattgttgcacaaaatatgttatgattgtttagtgcaccaaatccctcctgtctctaatagtctaatacatgacgtttgggcaaaattagtacaacgttaagacaaccaaattagtcaaatttgtactaattttgttctaacatcatcatttattagtaaccagaaagaattgcaattttagccggccatacatggtgtatattggacttttgaaaccacaaagcctacaatgtgatttttggataataaacttcactgctagccacatttctaatacaattaataaatttagcaacttgatatgtttttgacatttaagcctgtcagacctcctgaatattttgattgagcgtccaaaaaaaattttgtggaacactgctcttcctcctcccatccccaatcatcttccccacatatactcatatgtcgtatcaactaactggcctcaatactactgttgttaacttggttgccagaaactaaagctatctttgaaaacgacattaactattaatacaggttgtgggtcaaaaactctactacagactttaggtctatttctagtaaaatcaatacatgatggtaacagtgttatcaagtcatccaactaatagcgatcagtcgggataatgggtgccatggtgattgccaattagtcggactgattagtgacatgacggctaggatcgattagacgatttaacaacattagatggtaaggctgtataacccataaattaacagaatttttctattgagaatattggtgtggatttttctggaatgtggaaaacatacagcactctctctacaccacacacacttctagtatatgtgtacacgttaatgggccaacactagacacatggtccaacactccccctcaagatgggcgatagatatcaatcatccccatcttgctacataacacatcacactcttttactcctatacccttagtcaagcaatctgctatttgaccttttgagtttacatgattcaactctaaagtaccattatctaacttctctttgatgaagaatcgatcaatttccacatgttttgttctatcatgttgaactggattgttagctatattcatggctgacttattatcacaccataacttcagggagtcttttcttaatacattcaactctgataagagaccctttatccatagcatctcacatatcgcaagggccatagctcggtattctgcttcggcggtggaacgggataccacagattgtttcttgcttctccatgatactaaatttcctccaacaaacacacaatatcctgaagttgaccttctatcatcaaggcaactaccccagtctgcatcagagtaaccttccacctttagatgaccatgacctttaaagattattccctttccaggacaagtcttcaagtatcgcagtatacgatacactgcatcaagatgtccacttctggggtcatgcatatatcgactcaccacactgactgcatatgtgatatcaggtcttgtatggcacaagtagatgagccgtccaacaagtctttgatacctttctttattcacaggatcaccagattcagcacataatttatgattcaagtcgataggtgttgctacaggccgacaccccaacatacctgtttcatcaagtagatctaaaacatatttcctttgggagagaactattccttttggagatcgagcaatctcaataccaagaaagtatttgagatgaccaagatctttaacctcaaattccttacttagattcttctttagacatgcaatctcaagatcggcatcacctgtaataataatatcatccacatacacagctagaattgcaattcgtcgtccaaagtgttgataaaaaacagtgtgatctccgttgcattgtttatatcccatgctacatattgcacgtctaaatctgtcaaaccatgctcttggggactgcttgagaccatacaatgattttttcaatcgacaaactttcccaattgtctcaggctttgacaatccaggagggatctccatatagacctcctcttgcaaatcaccatgtaagaaagcattcttaacatctagttgatacaagggccatccaaaatttgcagcacaagagatcaatgtccttacagtactcatttttgccactggtgcaaatgtctcatcataatcaattccatatgtttgactataccctcttgcaaccaatcttgctttatatcgttctacccttccttctgggttttgcttcacagtgaatacccatttacaactaactgccttctttcctttaggtagtttctcaaattcccaagtttgatttttttctagagctttaagctcctccaacattgcctcacgccagttagaattacattgtgcttctttccaatctcttggaattgctacggaatgcaatgatgcaacaaatgctctatatgatggtgacaaagacgcatatgagacataattgctaatgtcatgttcatatccataccttgttggggggactccagctttagcacgcgctccttttcgtattgcaatgggcaaatcataagtgtcataatcttcagtttctccatgagacgtcaaaggtacatttatagcctctaatgtgtttggagagaactgctcagtacttgatgctgaattggtttcaggagcctgaggttgcacatgggactttcttcttgtatatacttcgcccttatatcgtaagtcgtctccacaagatttattattctcgtgactaggatgtgtctccaattcacttggcattacttgcatcttttgagaagcaccaatcaccacttccattttatttggttgttgttccattgaatcaaccattctgttctccccctctcgactagcttcatctgtgctagtagagacagaatcaagaaaaaaatttagatctgtcttctcaccatagaaaggcacagtctctctaaatgtaacatccatgcttacaaacaaacgtcgttcactaggactccaacacttgtatcccttttgccctgcaggatatccaacaaaaatgcacttcacagcacgaggatccaacttccccacctgaggtctatgatctctgacaaaacatgtacatccaaaaattttaggtggaaccacaaacttattctcaccgagaagaatctcacatggagtcttcattgcaagtatttttgaaggagtgcgattaataagatatgtggcagtcaatacagcttcactccataggaacttcggaacattcattgtaaacatcagcgaacgagcaacttccaaaatgtgacgattcttcctttcagccacaccattttgtggaggtgtatcaggacaggatgtctgatgtaatataccatttcttgacagaaatgcattaaatcccttgtttacatactcggttccattgtctgttcttaggattttgacttgagtattgaattgattctcaactagtgcacaaaaattttgaaaacacttcaatacttcatctttatgcttcatcacatagacccaagtcatccgagaaaaacaatcgataaaagtaacaaagtacttcatcccattaatagaagtcacaggacatgtccaaacatcagaatgaactagcacaaaaggagatatactcctgatacctcgactaatataagatgtccttgtgtgttttgcaaactcacaggcatcacacaatagcttgcttttatccaccccactcattacatcaggaaaagctttgcatatcttatcaaaagaaagatgccctaatctacaatgcaagagcatcactgcaacctccttctcttccattcttgttgccagcatagtgcatattgtaccattagtcccctcatgatccatataccacaatccattacgcctggtagctgtcccaagtctcttccctgtttccctctcctgaattaaacaattatctcgatcaagaataatacgacaatccaattgatcaaccaaggcacttagtgatatcaagttgacaggaaaggttggcacatacaaaactgatgacaacttaatagatggagtgcattgcactgtgccaacacccttgatgggttgtggtgtaccatcagcagtttgtataatttctttacgtgtggggggatatcttatatatgatgtaaattcactggacgtgcctgtgacatgctttgatgctcctgagtctaaaatccattttaactgtgtgacctgtgtgggtacaaaagcatgagcataattaccttcatcagtgtaggcgaagtggacaaaatcccctgtgtgagactcctgatctttatctccagagatttgatttttcttcctcaactttgtttcatcttcgtgttccataaatgtttcaagttcttcttgtgtagttgctgcattcgcccttgcccaactcctgcctccacgacctctgccgcctctaggagcccctcttcctctcccacgattaactttggaaggcttagaacaattacgtgcaatatgtccaacattaccacaattgtaacattctctagtatctttggttctcatagctgaaaacacaggatgaggcggcgtttgagaactttctctcatcactttgagtcttgactcctcctgggatatggcagctatggcttcttgtaggctaggaagagtggattgatgaaacatggaggcacgtcttccctcgaactctgagtttagcccccttagcaattgaagtacacgtcttttttccacccatttcttcgcccaagcaacacactctgagtgtggtagctcaataggatcataatgatcaacatcagcccataaacattgtaactcctgaacgtactccgccacagatcgctccccctgtttgatattatggaggcgatcttcagtctccaccatcaacataacatttccagctcccgagtacatttcttcaagtgctttccacatttctgcagcacttatgattgtatcaacagtgctagcaattgctggaatcatagaactcaacatccacgctgccactaaagagtttatagcatcccagtctttccattcatcacttaacttatccttgggctcaacgacatctcctttaacatagccctcgagtctctttgccttcaataatcgcaatgctcttctagaccatgccaaataatttttcaccccttctaacttaatctcatttggcattaggtctatcttctgaactggttctatatgagcaacattgtctttaattgatgatggagcctcatccctttttgctgacagtaattcgaccaatttaccaagaacctgctcaattccttgattttcccccataatatatatgtaataataactaggaaactacttgggcagctgcgtcaagatctgggtcacaacgtctagaagccaggaccaggagcgcctcctcttcctcctcctccgagctggatggatctcagtcacaggacgcgggcagcaggggggagcagcagcacctgtgtgccggcagcttcctcaagggttggacgagctgcggcagctggagagcctccccaagcacccctatctccagatccttgtcgccgacgagtgcccgcgtccacgtccttggccgccctcgccttgtcggcggtggcgtccctcctgtgctgtggctcgggacctgtccctggcctcctgcgcggcctccctgctggcgtcggtgtactcgcccgtcttctgcctggtcacgtccctcgcctccctcgatcgctcgtgtgcctcggcggcctccttcggccgtcgctgatctccttctcggtggtcttctccgtcgaggccgaagacactcgtcaccgcgacgccatcgccgttgagcctggctccggtaccatgtggatttttctggaatgtggaaaacatacagcactctctctacaccacacacacttctagtatatgtgtacacgttaatgggccaacactagacacatggcccaacaattggacatcccaaaatgtcattcatgaggtgtatcaggcagtccaaagaatatcctagtattattttgttcatattacgaaagagcctctagcgtaatggttaaggctttcgagtagcacctttaggtcccgggttcgatcacctcggatgcgaatttcgggtttagttaaaaaaacttattgtgccccacccgctcccaggttacgtcctgcacgccacccttcggttggaccattgtagggtggacggtgacagcctgctagtgatgggggccaatgttcggagatttttcttggatgagactatgtttcggtctcttattaatataataccaggagggtggtctttctctccatggccgagttttttattttgttcatattgtaatgtttgaggtgaaagcaatttaatggtttgtaaaagtagggattgtatcaggggcgaagctactatgtagccagtgggtgcaaatgcaccccctaaaattttaaaagtcagttatagtgttcaatttttcaccatatatgcatcactcacatctcatccttatgcatccacaagagaggtgcaccccttcatgtttgctctagcttcgccactggattgtatgtttgatatgcgcttggtattaagagaaaaaagaatacaaccatctgattacagaatctgcaatacctcaaaagttgaggccagagtaggatgcaaatagaacaaataaccaatcactgatgggaaaggaaaaacatgagcaagacaacatcctatgcaaaagcttatctaagacctagaccagtgagacctctggcatcagccatgcgccagaggtgagtttcccccatgagacccctttgagcatcctggattaatatgcactgaccatgtcaaatagttgtgattgacctctggccagtgtaaattggcataccccaaaatatggaaggggggaatggcatgggttatttccaccatttgattcacttcaaaaatttcttctcttgtatgtttggtagaaatggcaatcgcaagacataagcgctgatacacggtcgacagttaaaagaaaacatgggtgtaaaacagaaactaagacaagatattgatatattagagtactctcatttataaagaagtattatatatctatattaacctacatgtttattcattaactgttttcatgtgcatctgtatggtcatcgagtcccaccggttctttttattgaggaacatgcatatatagaccctgaataccaataatatgtgataccagtgtgtaaaggagtttagggcagtttctagaagcactaataaatccaaacgtattatatgttgtcaaccgtttataataatccatggagctttgtcatattcttttactaaatatagcgctagtaatagttatgtaataaattcggtttcagattagtactccattccaaaattgtaagtcgttcaagcttttttagagatagcttttgctacacaccttgatatatgttatgtctagatatattgtaaaaactatgtatctagaaaagttagaacgacttacggtatgaaatggaaggagtacaaagaatactgtgctgcaaggcagtccatggttcacttaattatcctattatgttgagttccttttcatgatgttgacccatattaaataatgtaaatgttctttgctttgtgtagggcaattggtgccatgaatatagaaaactaaaggcgaaggtcgagacaatacagaaatgtcaaaagtaatttgtagtgattagttgctgaaaatatgtaatatgccctgttgaagataaatatgaccaagccttgtgtgtcctgcaggcacctcatgggagaggatcttgaaactttgaatctcaaagagcttcagcaactagagcagcagctggagagttcactgaaacatatcagaacaaggaaggtagtatgatctatatattagactgcagtgcattacttacgtgatgcctactacaccactgacagccatgcgctctgcatgttggaaaactaacaagtaaatattcaccgcatgcgcagagccagcttatggtcgagtcaatttcagcgctccaacggaaggtaaattgttgagcttgctaaagttggctgttcgaacttcctcttttaagaattgtatgatttctttagctggccattagatgggcatggtttattgcaagtgttaactactttggttgccttgttacatccacaaaatatctctgctcttgcgctgtgctgcgatgcattgttaccgcaggagaagtcactgcaggaggagaacaaggttctgcagaaggaggtaggcagacgctgctgcaactcaacgtcgcctcatccatgctcaactggccctctgttttctcatgaaccaaatcaaatttacagaaagcgttactcctgcatgcagctcgcggagaagcagaaagaccagcggcagcaagtgcaacgggaccaaactcaacagcagaccagttcgtcttccacgtccttcatgttaagggaagctgccccaacaacaaatgtcaggtagataacagattacattcacatcgtgctacaatcccaaatagtgatgtgacctcattttcgggtaaagatttgagtgtgcttgggcttagctgaatcccatttcaaaaatacacttgtgcattttcaaaatatactcttgtagaccagcatgagcaatgttggcagttgacccacaatgttccttcaaaaaaacttggatcgttaaagagccacaaagaaaaagaaaaaaaaatcttcaggaaatgataggttagtttttttcttcacataaggtatgtggtcatttttttctacaaattttcgtgtcatccctctagatgtacgggtttttttttgagcttgcggtttttatcttgtaaatttccaaaacagtagccgcacgcctgtgctcagccaggtaaatttcctgcagacgcactgctgacatgtcaggaagcaactggctgaaaaatgaccgtttgtgtccggtttttgcagcatcttccctgtggcagcaggcgggagggtggtggaaggggcagcagcgcagccgcaggctcgcgttggactgccaccatggatgcttagccatctgagctgctgaaggtttgccctcaccgtcgcgatgtgatagcccaaaatccagcaagtcttccccggaccccggactgtccccgcttctccgcctggtgcagtatcgtcgtgatcgcgagaagcagcagcagcggtttgccgtattttttaccactgtgtataagtagcatatctgcaatgtgtatattttgttcaccgttcctgctggggcggccgcacggtactttacgcatgtaatatatgtgcttcatcaaatcactttcactaccatagcatgtgccggtttgtggtagtttcatgtctcacataatgggtacacattcatatcccagtggtctcggttcttcacatcaaagttctatttcttcatgcagcaacttctatatcttcatggccgttcaaaaatacgtacagattaaagatgcagctgcatatgtaacatcaatagagaaagggctacatctgatttaattgcgatgttctgatgtctcctagacaccttttagtacaaaatgcagatgtatgaaaaccagaggacgacaccgtggtattctgtcgaataaactaataaagatggtcttaaaaaatgatctttctgccatcggtgatgtacaaccatttcgccatcacaaatcgaagtggttaccatcccatgtcatagctgacacgaatgcctacccaacccaacccccaacacacacacacacacacaaaaacacatttaacaagctaaagccctagttacttgtaaataacgccaataaacatcctctgaattctgtaccttgaccctacaggtgaatggaggatgcgccaaggcatgtggaaaaaagagtgggatggctattaggatagccgaggtagcttctccttcagccgcgaaatgaacttaaatgtctcctctgcttttacttgttgataaatatcattccttgataccctgtcgggatggaatttcagaagagcttgcttgaaggctttaacctgaaaaagataagtaatgtcatcaaattaactactccctctatctcaaattagtatttgttttaactcttggttttatgtctatattcatatggatgaagatgaatctagacacatacaaaactcctaaaacgaattttaatttgggacagaggagtattatgttacaggcattcctaaatctcttctatgtgccgagcagaaagcttataaattagtctctggaaaaaaaattgagttcattgaaccagaacacgggtttataaggtacaggtagccactgatcttcactacccaaaagttgagttcattgaataaatttagcccaacaatctgttgcactacccaatttgttcttcatggt

SEQ ID NO: 504 - protein, 245 aa, Zea mays
MGRGKVQLKRIENKINRQVTFSKRRSGLLKKAHEISVLCDAEVALIIFSTKGKLYEYSTDSCMDKILERYERYSYAEKVLISAEYETQGNWCHEYRKLKAKVETIQKCQKHLMGEDLETLNLKELQQLEQQLESSLKHIRTRKSQLMVESISALQRKEKSLQEENKVLQKELAEKQKDQRQQVQRDQTQQQTSSSSTSFMLREAAPTTNVSIFPVAAGGRVVEGAAAQPQARVGLPPWMLSHLSC

SEQ ID NO: 505 - DNA, 21285 bp, Zea mays
ctcgaggatcatactaggacatgagttcctcccacaaaatgacatcttcacgcggcgggacaattcctgcactcccaatgcatgcaatcaatagatcctagcatacatgagttcctcccacacaaaaaagtagttgatggtagctgaaaagaaatatatattttatatgtatagtcgatagtggaagataggagaatgtttagaggagccgttacagaaggagtgaatatagaaaggaaatcttgataatgtggctgcataataagatatatagtagaaatttagggttgagaacagtcttaatgacgcactcccttctgcaaataggcagacagtgcgtgcgcacccgaccaatggcggctggggtaggagaatgtttagaggagccgttacagaaggagtgaatatagaaaggaaatcttgataatgtggctgcataataagatatatagtagaaatttagggttgagaacagtcttaatgacacactcccttttgcaaataggcagacagtgcgtgcgcacccgaccaatggcggctggggtcgatattttttcatcggatgggaaattccaggcttcactttcctccctccccaaccaaccacccccggccacccctgacccctcccgcgctcttttcttttactctccctatttttttaggtggtggttcgtctccgccccgtccagcaccgcccgcagccggaaacggcacccctaccgaatccgccctcctctttccgttcgttccgcctcgtcgctctcgctctcgctgcaccgcccggccccagcctgccttgttcacggcaacaccggcagggacggaaaaggaaagcccaggtgtgcaaggcaggcacacatagccacaggccacggcacaggcagcgcggcgctggctacggccaaaaaccctacgcggcccctcggcccagctgcttccccctccctcttctctctcccaccaaccaacgccctttcccttgccatttttggtgagtgcgccctttcccttcctccccagatccccgtccccgttttccacttttgcctccgccccaattcggataacaaacccctccgcctcgtcgcgtctcctcccagccgagccgatccggtagagagagggagagggagggactgagggaggaggagctgggttccggtcccggccgcccggccggctgcgcgattcgattgcagctctcgtccccgggcggcgtccaggatggtgcggggcaagacgcagatgaagcggatagagaacccgaccagccgccaggtcaccttctccaagcgccgcaacggcctgctcaagaaggcgttcgagctctccgtcctctgcgacgccgaggtcgccctcgtcgtcttctccccgcgcggcaagctctacgaattcgccagcggaaggtaccaccaatccccttcccccaacccgtcttcccttcgagttcgagaatacctcgttttttatggtctttctttaggccttagctatccttttttttgcatgggggtattcctgggagtataatccttggctgcgggtgtgtcgattggtaaatgagctgattcgagactcggattacttcattgttctccgttgggggctgatatgggagtaattcttgcgcgctccctgcgcaaagccctgcagcaaccgcgtggcctcgcctctctcgtccttttgagtttttggggacgaacacatctcttccggtgaatataaaagataccacgcaccccactccctcccttctccccctctcccgtgaacagatcggtttgaagattttgcgccccgaagatctttacatcaactttaccgtggtttcaggcggaaaggacagttagtacatgtacgcagttcatttctcctataaaaaaaactagtgcagccgtcgagccaataggaaaattcgacctgataacatggcaaaatatatgttcacgtacggcgatctacggatcaggcaggctacgacctacgagtggtcacgctaaatgcactgcagaaggttgttcagctatcttttctttagtgattccttcaaattctttctttgtgtcagctaaatccgttttaagttaaacccgttttatttaaaccatggagcgatctggaggtccgtttctacttctgcatcggtcttctttgtagtacggctggcaccatctgaggaagttcttgttttgctgttcagacacaaaaaccgatgcatgcgatattgtgtactatgccttccactgtgcatatattgtttttattttttcggcttttattgccacatagttaacacaaagaagggatttctcactcttaccacacactgcggcgccctttataaagctactgctgactgcagttaatctcatccacgtttcattagattttggggctcacccccgtttcttgcgtgccttgtgcaagtaaagaaatggattctaaacacggctaccatctctaacagagatgaatgaatgacataagaaatcacatgcaaatatgacgagaagcactgtaggttacccatcactccttgagatacatctttagctgtggttttgccaagtaaactgtcactgaaaataggtgatttctagggatggttttattaagtacacccttcctagaaatcaattttcaaggccagttgactaagtcaaccacccttaaaatagccacagtacaaatagattcattttttccaaatagattgagtttatatcaaaattgtagagttcaataagatctaaaactttgtggttgatagttttttttatttgaggttgctctatgtcaaagttgcaattctcgatgagatctaaaagtttctaagattcttacaaagaacagtatcatatgtatagtcatgggtgacagtctgtgtgttggtaggaggtggtatgcatgagttctagttccctgcggctgcacttgtgcaaaacaagcaggccaaaataagtttttcttgttttttgtaacttctacatggttttttttaaaagccaaaaaaacattttttaatggtggttgtcttgagggaactaacctcctattaaaattaacttctaggaatggtttcaaaactgcccattaaaatgatttcttttaattttacgatagatagcatcgcagcagtatttcaagataaaaactcggccgagagggaaagactgccctcccagtattatattaagaagagaccgaaacatagtcctggccgagaaaatccccgaactctggcccctatcactagcgggccgtcaccgcccattctgcaacgacccatccgaagggtagcgcgcaggacgtaacccgggagtgggcggggcacaacgaggggacttttttttaatcaagccagaaattcgcccccgagggggatcaaacctaggacctggaggtgctactcgaaagccttaaacaagatcgttttcaccgttagcaaaaactatgtctgtactagtggtgatggcttcatagatttggtttatgtgctagatctattatagtaatacaacctgttgatttttttgcaacatagttaacctagaagttaattttgtattcaaaccacattgtggccttcgtcagtttgatggccagtggtgctctcttgtttaccgctggccgtagtttcatcaacgtttcattagatttgggcctcacccatcttctcttgccttgtgatggcttcatagatttggttatgtgctggatctacaagtaatatagtctgttgttttccccacatagttaaaccaaaaaggaatcttctactcagatcacattgtgacctttgttaggacgatgatagtggtgctttcttgtttactgctggctgtagtttcatccacccatctatctgccttgtgatggtttaagagatgtggttatgatctactagtagaataaggtcttatttggaacctttatagctaatagttacctgctaaagttagatatagaggtttcaaacacacctacctaataccccagctaattgttagctaagtaatagttaataattagttcattagctggtttaacccagctaataatttgttagctggctaactactagctttaggggttccaacttccaaataggacctaaactgtttgcatagttaagttttctgccctaagcccctaacagcccagaccatggtgcaaaaaaaaaaatatatagttgatgcccagtagggttcaagcatgttaagcctttggaaacctaggggactagacacagaaaataaatatacttgtttcggattataattgttgagagaattgtgtcatgctaccatagccaaattgatctaacttccattcatactgctcagctttctgttaaggtgataccaaggactgattcatttcttttagatgcgattaagttaccagatataatcgagataaacaattcaatgagtataatttcaaataaagaaaaatgtagtgacaatgtttgaaattttgaggtatactgttttattgacctagacacttgatgaccatccaaatggagaaaatatttgaactataagttgaattctaagataagaaattgggtctttcaaagacctgttttcaaaatcatagtttcttaatttgctttatttattcattcatgtgtagcaagaaacaaattctttaaatctggtatttctataattgctctcttatagcaagctttcccaactcatagttagctttgcaaaaaatgctctctacataattagtgttgtcaacgatgttacaattgattgttctcttaaattgctcttacttaaatatcatggtgcctaacctatgttttagttagacatttatctatctatttaaaatatgtcaataacttaatcctaattatgagatcaatattaaaaataggttgtaggacaaatatatatttacttctagccatgtgataatatcaatatatcattgtatagtccacttcatctccccatgtgacatacaaatacattggcatgttaagtaagtcacaaatgtaatcatgagacctatgactaccatcacataagtcctattagtacaatgcatgtgcgttacaacggtacatcaatcatgtttggtggtatagtgcaactgttgtacaacactcgagagtctagtggcaacacagtgtgatggaccctccaaaataaatttaaaaataaagtagaccttcccaaaaaaaaaaaattaaagtggacatatggtccatatacccgatattttttttctctcgaaaaacgcaggtgagctgcgcatctttatattaagaagaagggaaattaaggtccaagaggaccagtacaaaaaaccaccctatggtggccagcaagaagcataaataaaactgtccataggacaaagatacaaagagacgaccaatgaaaaattaagtcgagcttgttgcgcctagagcagcagcaagatcaaggcttccgaggtgtttggcaccagccaacacccataacgatagctcatcgatgaagcttctatgcaccttgtcaatggttgtcgaatcttcatcgaagataattctgtttctatgcaaccaaaggcaccatgctcccaaaataatggcactgttgactccctttctataatttctgtgcacctgaaaggtcacttttccccaccaatcagcaaaaatagtatcctgtggccctggagttaggtggcccataccaaagggggagagaatgctatgccaaaactgtctggcgaagacacaactagtcaacagatgctgaactgtttcttgctcttgttcacagaaagggcatgcttccggatgggaagacctcttttttgtagcctgtcatctgtccaacacttattctgcatggctaaccataaaaatgtcttacacttaggaggagcccgagatttccaaagtcttttctaaggttcgaaggtgatggagcctactagatattgaactgtagatactgcactctatctcagcaaaaagattgagaaaggtatgagttaaaaaggagatttgtcccttttatagctcgctcgtcgtccttcatctagagaagtggtactatccgggagagttgcgctacctgtggctttgtgtcatgttgggcttggtattttctcacgtcccatctaaggtgtaaaggtggttgttaggcgagacatgggggagaaaaacatgtctactctacatgtttcgcgtttgacgcacgacacatgaaacttgtgctttaaaggagtattttatgtgattgttgcactccaccacaaagaatccactttttaagtgatttcaaagaggtttaggtttggttactaaaatttatgcttgaatatagagtataaaacacaaagacacatgttctttgttggctaggcgggtgtgaatgtgagtttagaaccaacaaccatggtttgaatcctcaaccatataaccgtggacactggtgctttatacagtagagaaaaaattgccactgggcccatccaacagccacccgctcttcatgtcccacatgctggtacctttttccttttttttaaaaaatatccgtgtgttgtgacagtatactaatcaagtttgatagtataatacaacagttgtacgacactcaagggtccaatggcaagccagtgtgatgaaccctccctgcaaaaattaaatttaaaattaaagtataccctccccaaaaaattaaaattaaagtcgacatttgttctatgtaccagaaattaaattgtagatattgtactttatcttatccaaaagaacgagaaagatatgtgttgcaaatgagacatatcccttttcatagctcgctcggtcgtttgtccttcttcagctagtcaggtggtactataagagagtgttgcattgcgtgtagcttcgtgtcatattgtgcttgcgtgtttctcacggtccatctaggaggtaacaacttggttgttaggatgtgcaggagaaaaaacacaagtgcgtgacgtacaacacatgaaactcgtgctttaaaggagtagagtagataatagtggattgtttaatgtatcaactactttgcttgatcctaatataaaaaaggatgaaacataattctaatttatatgatgtttcatccttttttaactaatcttaataattatttttaaacagttccataacttatttctatcataaaaaatatcttctatatttaagcaataaagacccgcacgtgtcggatatagaaaggatatcactaaactgcatgaatacaaatgtgagccaaaaaatgagtggggggggggaggggcgatttgcatgtaatcattactcgattgttgtaatgtcttggttttaaatgtagaaacatcaaaatttgatccaacaacaaaaatattatttaggtatatgcttatatgttacaaggaaggccaatgtaaatgctagtaaccttaaaggaaatactagagaaacattgtcatactccaatcattgttctattgataatttttcaaagttacaacatgatttcacatcttgaaggctaatcaaccattttaggtgtatgtgctccctaagagacaaactatgagctaactctccaaattaccatttgtaatggttttttgtcagtagaccatgacttgctagatctcttgaacttttttggacccacatatcaagcgctcttgactaaatgacgtcctcttagaataacacatttggccatctccttggctaggggagtgctgaatgaattacttgtatacaaagtattttgcatgctcttgattctcaaggcaaaagatgtatattttcactttgttatgaatagcacttgtattaaatatgaggtcctaatgctaatatatatacacatgtacaacatagagtcctatccatataacatagagaaatagagtcacaataggaaaacagagtcctatctaacaccctctcaaactcaaggtggatcaaccacaccgggtttggacatagagtcgatgctaagctctagtctacgccttggtgaagaaatcactcaactaaagcactaaagacacatagtgaagatcaataatatcatcatgaacatgtggtcatgtataataagtatcaacaccaatatgcttactaagctcatgctttactagataacgagcaatactaataacacatgtactgtcacaccaaaggggagttagtatagacgtagaaacaccaaaataagtaagcaaccattgtagttaagtcacctttattgtcacaagagccatagcacgcaactcatcatctgtacttgaacggtaaactactaactgcttcttagtgttccaagcaatgagggatccaccaagaacaacacaatagatagaaagagatcgacgatctgaggaatcactagcccaagtcgcatcatagtagacatggagctgcaagcagctagagcgaggaaagaatagacgacaagagatagtcccatgaagataacgtcgaacaccaagaatatgactataatgaagttgagtgggcgtagaaacaaactgacttataatatacacatggtacgaaatatcatggtgagttacaccaagatagaccagaatacctacaatgtgatgatagcgagtaggatctgaaagaggctcaccatcaatgacatgaagacaaatgttgagctctatgggagtgtaaacagtgcggtgatcagtaagggaagcctgatcaagaagcccatgaatgtatttctcaggagaaagggatagaaaccctccagagtagaggaaacctcaatcttaagaagaaatcgaagaggaccaaggtcaaagataagaatctactcacttaagaagtgccttcacaaaggtaataaattgagtcatccactgtaaaaaccatgtcatcaacataaagcataagagtcctaccatgagatgacatgtgcaccaacaaagcaggatcatgaatattggtagagaaactagtagaagtgaccacagaagcgaaacacacgcgaagacaaagattagaccctcacaaaagccgtgcctgaggactagggaaacctcaagccgcgcctgcctgagcgctgccgtgcgagcgcctgggtgccttcttcgaaagaacgacgacagatgcaacaacgaggaagctcgtctcgatggtggttgtcgatgtagggttcgggcgagccacacctgcgttcgatttgggggcgagatgggttgtagtgcatggaccttgagacatgttccctagagccttatacatgtatttgagtatttatgttcatgaaattttcttagcgatatgttttactatataattaattaataattttcatggtttctacaaaacctttgaatgaataggttatgttaattccaatatagctttctatagcttcaggtgaatgtttgtagacctttatttttttatgatactttttgaagatattatgcaccattagatcatttctccatagagggcacggtcgaatttgaacaaagtaacaaaatcacaaatttttaagcccatgtcaacattcatgacaagcttaccaactactaagatttcttagaaagaacatagcacaagttgatctattacaaccacaactaaaataaggttaagaaacgatacagaccacacaatatatctcacaaaacgtcgaatgtctaacaacgattacaaaaccaagaccaaagtacacatatataaaggaacgatgtttttctagttttgaagacaaagaacaagatagtttaccaccaagccatctaacacgatcgatgctgtcttttgatcatgttcttcatggcgatggtaatgcaatgtggtctcttctaatgcccctcatcttcattctttaggaactttggttcttccaacctaatacaatggaaaagaacaatgccaaaaaaaaagaatttcagttggatatttaacccttaattttttaaaacaaccattcatttagataaatacaactatgtggattttttttctattttattaatgtttgccttaatccataagatcaaaagtctaggatacatatggcactaaacatgtgttaggcaacaaccaaactccatgctaattctatcataataacttgttctacaatattttttgtatgaaaagacaacctcattactcgattatcctctctcagtcatgttagaatagcatttaaaaatcacatgaaaatcttgattttaagaggtatcctagattcccatttttcttatgtcacaccattatcattactatattggtggttgtacttcaacttaagagagaaaattatgcatttctacaaattcattttggtttatcaagccaatttttgtagcttgaaaatgtattagcactcgtgccaaggatgatcaatgacaatccaataggtataagtgtttatacccaatgttttgaactaatgtattagcaaggagtcagggtttctcacttcctttgttgggtcaagccaagaaatttaggtatggcacgagccatagcgggtcataatgggcctccaccactgtcatcctacaacactactctcttgacgatcacgtcctcattgatgttgttcgcctgacgatcccgtctttgcacgggtgaacaatgtactcttctagatccttagcacaatcatagtcgagttgcaggacatcgtccacaattgtgacaatgctactcactaggcctaggttgctatcgaggaacagttccttggcaaccatgaggtcggtgccctccacctaaatattggcttccgtaacttcgtttaaggggacctctccatcactaagtactgccacctaatgatgggcatggtggacttcctacatgacctcagcgagcctattttggattgtaccccatccttaatctcctttgcggcctcaatgagctacaatcacctatagacttggatcacacgatccatgtcgttttttcattccacactgtttgcaactatctcatccttgaggagctcaccaaggggggccatgtccccctccgacaccgccatggccttcgacaactccacctctagtaagcaaccatagtgctccactcctactattagtggtctgtccttgtgcttgcatgcaccatcaacgtcaacaaccccttgtccccctaacaactctggtggtggtagcctcggtagcagagggatggccacggtggtggtagtaggaagggtgacgcaccctagctatcactctataacccatggaccgacacatttctttatggctcgacccaacgatggttggttcgtcgccatgcccatcgcaattgcagtcaatcctcctcattatgcccacctttggtagcctcgagtgcctcctagatctcccctcgcaaggatacccacttcagggccaagctgtttgtcgggtaactccgtagatacccttgatactttcccatgtgcaagtggatctttagaatagcctctcctagaccgctcctcgacgtcttcactattgagtttttttttccaaaatatcatgggcctcgttatctccagtacatgaaggtagccataccataaagacaattggtgtgatctcgcaatactagaagcataacgttgagctccacaggagtgtcaacaatgtgatgatcattaagagaagtacggtcaagaagcccatgaatatatttctcctaaggaaggtagaagccctccggagtggacaaaacctcaatcctaagaaaataccgaagaggaccaagattagacataagaaattagtcactaagacatgccttcacaaaggtaataaattgagttattccctgtaataatcatgttatcaacataaagaagaatagtcctaccataagatgacatgtgcatgaacaaaataggatcatgagtactagcaaagaaaccagtaaccagtagtattgaccacagaagcgaaaactgaaatacgcacgaaatccgcgcctaaggaccacgcctgaggaccagccgaccaggaagtctctcctgctagactgagacttgatcagcaataccatgacccgcacacgaagaccgagactagacctgcacgaaagccacgcctgaggattatcctcaaccttttcttttttaataatataatttgttttctaaaatacatgtcatgtacgggaacacatatgccaggcgcaggagagcccacgacgtgcgccgggcggctgagtgagcagcaagggcgcaggagcagcagacaatcagctaggatggaaagtacctaactgattagtcatttccctattttggtttagctgggatggaaagtacctagctgattagtcatttccctattttgattagtcctacaatcaaggagaaccttctccattttgtaaggccaccggccatataaccctgtacggaggcaccttgaggggaagcaataatcattactgtccagccctctctctctctctctctaagccggcgactggaaggttcacccagtcgacgttgaagctcgacgtgggggcataaccctgccggcaaccatggaccaaggctacgagctacgtagctgaggtcctcctgccttaggcactaatgcccatgacagcctggtatcgcgaagccgacgatcctcgtcttcttctcaaccacccacatccaccccagcagccaccaatcagccctccccaccaccctcgccctcaacctccaccgcatcctcgggccacgctaccaacatgtccgacccaaccatggtcgacctcatggagctgatgagatcctggaaaacggagatcacgacggagatcagggagatgaaggacgagatggcctccataaaggcgaagtcggcctcgtcatctgacctgggaggcggcggttgcatggagcctcctcgtgagcaggatcggcgcccaggttccagacgttggactttccccgtttcaatggcaagtctgatctgaggctctttatcaacaaatgtgagtcatgttttcgtcaacagcgcaccatggccgaggagcgcgtttggatggcggcctacaacctcaaaggcatcgcacaagaatggttcatgcaactctaggaggacgacgacacgccgtcgtgggggcgattcaaagatctccttgatctgcgattcggaccggcgcggcgctcggtgcccctcttcgagctgacggagtgtcgacgcaccgacaccgtggaggagtactccaaccacttctagagtctcctctttcgcgctgggcggctcgacgaatcccaacgagtccagctgttcacagacagtctgcttccacctctcagccacgccgtccggctccacagtccggagacgctggccgcggctatgggagcctcgcccgacaagtggagttgatggaactcgacaagctggcggcggccctggccaagccggcgcatcgcgcgcccccgaccgccccgacacaacaccgggcgttggcagcaccacaggcgcccccgctgctcgcgctatcggcaccgccggcgaatgctgcaccagccgcgcgagagcggcaacctggttaccgtctatccaaggaagaacatgaggaacgccaccggctcgggctgtgtttcaactgtgatgaggcatacttccgcagccacaactgcacctgtcgccgcatcttctacgtcgaaggtgttgcgctagagacagacgacgatgtcataggcgctgctggtccagcgggggagccccccatctactccctacatgcagtggccggggtacctaccttcgacacgctgtgggttcgggcgctcctcgggacagcagagctagtcgccctcgacacgggatcgacgcacaacttcataggcgagcgcgcagcgtaccgctccgggctgcacatccagccgcgcccacggctcgccgccactgtggccaacaggcgagcgcatcatctgcccgggggtcatccgcgacgcgctaatcaaggtgcatggtgagacgttccacatcgaccttttcgtcatgcctttggcaggtttcaacctcgtcctcggcacgcagtggttgggtaccctcgggcccatcgtctgggacgtcgctgtgcggactatgcagttccagcgcgcgggacacgcagtctgctggaccggccttgcctcttctgataggccggccctctgcgcggccacggcgactccgacgtcgatgcagccccaactgggccgggaggccctcctcgacgcccttctttactccctcggcaacgtcttcaccgagccccgcggcctcccacccaagtgtacccgtgaccactgcatcaccctcaagccgggagcgctgccgatggcggcccgtccgtaccggtacccgacagcacacaaggacgagctcgagcggcagtgcaccgccatgatcgagcagggcattgtccgccgcagcgactcgacgttctcctcaccggtactcctcattaagaagccggacggctcctggcatttctgcgtcgactatagggcgctgaacgcgctcaccgtcaaggacgccttcccaatcctggtggtggacgagcggctggacgagctccacggcgcgaaattcttcaccaagctcgacatgcgatcgggctaccaccaggtccggatgcgcccggaggacatccacatgacggccttccgcacccacgacggcctatacgagttcctggtgatgccgttcgggctgtgcacgcctcggtgacgttccaggctttgatgaatgatgtgctgcgaccgtttctttgccggtttgttctggtcttcttgacgacattttgatctacagtaagagctggggagaacaccttcgtcacatccgcgccgtcctcgaagaacttcagcgccatcagctgttcctcaagcgcaccaagtgtgtgttcggcgcaacgttgatcggctacctcggccacgtcatctccgaggcgggcgtcgccatggacccggctaaggtctaggctatccgggactggcccacgcctcgatcagcatgggcggtacgaggcttcctcggcctggcgggctactaccggaagttcgtccaccactaccgtaccgtagccacgccattaacaaccttgttgaagaaggacgggttctcgtggagcgagaaagtcgcagcggcatttgcagcactcaaggaccggtcacctcggctcccttcctcgccatgccatacttctccaagctgttcgtcgtcgcgtgcgatgtgtcgtcccacggtttcggtgcagtgatggtcaggacggccaccccatcgcttttttcagtcgggctatcacaccccgacatcaggcgctggcggcctacgaacgggagcccattgggctcatcatggcggtccggcactggaggccatacctttggggacgctggttcgtcgttaaaaccgaccactacagcctcaagtacctgctggatcagtggctcgcgacgattccacaacatcactgggtcgacaagctcctaggcttcgatttctccgtcgagtataagcccaagtcgaccaatgtggtggcagatgcgctctcccgccatgacacgccagacgatggccgatggggctctcctggccctctcagacccgcgcttcgacatcgtggatcgacttcgttaggcgcagctcaccgactccgccctcgttgtcatgcatgacgaggtgcaggccggcatcaggcgcgcgccttgggcggtggtcgatgggatggtccagtacgtcagccgaccctacttaccgccatcttcaccgctgcttcaggagctgctggcagttgtgcacgccaaaggccacgaggggtccagcgcacgctgcaccgccttcgacgcgactttcactttcctaacatgaagcaggtggtccaagaatatgtacgagagtgccctacctgccagcgccacaagttcgagcatctacacccggccgggctcctacttcctctcccgattccacagggagtctggacggacgtggcgctggacttcgtcgaagccctgccccgagtacgcagcaagttcgtcatcttgacagtggtggacaggttcagcaagtactttcactttattccgctggcacacccatatttggcggagtccgtggctcaggcgttcttcgcgaaaattgtccgcctccatggtgtgtcgtagtccatggtgtcggaccgcgacatcgtgttcacctccaagttctggcgggagctcatgcgactgatggggaccaatctccacatgacatcggccttccaccctcagtcggacggccaatccgagtcggcgaacagagtcatcaccatgtacctgaggtgcctcacgggtgatcgaccacgacaatggctgtagtggctctcgtgggcagaatacctcttcaacaccacctaccagagctccctccgtgacacgccattccggatcgtctacgtctacggacgcgatcctccatccatgcgatcctatgagcgggggacacacgtgttgctgctgtggccagaaccatggaggaacgcgaggagttcctcgctgatgtgtgccatcgtctggagcaggcccacgtcgtccagaaaaagtattatgaccagggacaccgcgtcgtcacatatcaggtgggcaagtgggtgctgctccgcctccgccaccggtcccctgcctccctcaacaccgacaccaccagcaagctaaagcctaggttctatgggccgtacagagtgctggagatcatcaacgaggtcgctgtccgcctcaagctaccggcacgagcccatatccacgatgtgtttcatgtgggcgtcctcaagaagtaccacgacacacctccacaagctacgtcgccactgcccccgcttcaccatggggccgtcaccttggagccagcccgcaccgacaacaccaagctcgcccgtggagtgcgccaggtacttattcagtggaaggaccagtccccagcatcagcgacttgggaggacgtcgacaccttcagcgccaagttccccacattccagctcgaggacgagttgcctctcgaggagaggagagatgtcatgtacgacacacatatgccaggcacaggagagcccgcgacgtgcgacgggcggcagagcgagcagcaagggcacaggagcagcaggcaatcagctatgatggaaagtacctatctgattagtcatttcgctattttgaattggctaggatggtgcagcggtatagcctaccgtctgtatccggaaggtcttgggttcgagccccagcctctgcatattatgcgggtaaggcttggcgcttaaagatacccttccccagaccccgcacagtgcgggaagcctacgacactgggtacgtcctttttaggatggaaagtacctagctgattagtcatttccctattttagtttagctaggatggaaagtacctagctgattagtcatttccctattttgattagtcctacaatcatggagaaccttctccattttgtaaggccaccggccatataaccctgtacggaggcactttgaggggaagcgataatcattactgtccagccctctctctctctaagccggcgactggaagtttcacccagtcatcgttgaagctcgacgtgggggtataaccctgccggtaaccacggaccaaggctacgagctacgtagccgaggtcctcctgccttggacactaacgcacttgacaatacatgatttaggatttaattgttggagctcaatttttttagtgctctcaatactataatgtagtattttgatttttggggcactattttaatgaaccttgttggagatgctagccacgcatgcagtcagctgccatgcaggtttctcatctcagtcacgcatgcagcagaggcgcaatcacatattggagaagcttcagtcaagtctataatttaggatatttctatctagttgttagtggccaggagccattttatccactcgcactcggtttggattaagcaaaagagtttactctccaatctcccttctttctaatctcccccattcatcatagggcgtcaagggaagctgcccccatactctgacgtccttgacactgcaaaaatatatataacacaatttagcacatattccctctgttccgaaataaaatgtgttttagagaattagtggattcatataatatttaatgtatattttttgtacatatatatagattcatcatcatccatttgaatgtagacataaaaaacaaaaacaaaaacgactactactttaggatgaagagagtattttttttgtttagaatactaattatgtgatcaaaacatagtaaaaaaggatgcaaaaatttataaatgtttagagtgtgtacctagatgggctggcaccactgtttcgctgccggcccatatgcaatacaacaagcctttcgttaaattctaatttcaatttatcgcatccaatctatttgatgcattttgtgatctatcatcgatccatgttttaaaatgagaaaattacaagtttttgaatatgcatagatataggttaagaatttgtgtgtttcacaataaatgagcagtatactaagttctgacataattctaataaagtttatttatttgtctcgttttttcagtgcgcagaaaacgattgaacgttatagaacatacacaaaggataatgtcagcaacaagacagtgcagcaggatattgaggtaacttggttatatttcctgttaccaatttcaattcttgaatgtcgattttatcaagagattgtgtctatcctgtggatatatattccttaagataactagcattgatgggcctatgttgccaacagtatgataaaatttctagtggatgtccatcatttcccagctgatgattcttgtactgaaatctgaagcataaaactatactggagagaggctttggcagggtacaactgatgtagagctgaatattttaaaaggacatgtgacgtcgatatatacagctgaatattttaaaaggacatgcaacggtagatttttttagaagcttcgttcatttcaaaacttaaagaaaaatatgtgaatgtataggtgatataccatttggtagttttgatgtagtagtagtgatactaagattgtctggtccggacctaaactgcagcgagtaaaagctgatgcggatggcctgtcaaagagactcgaagcacttgaagcttacaaaaggcaattacctagctatcaaatactgatatccttatgtacctgcccacggactaatctgcgttgaggcggtgcaggaaacttttgggtgagaggttggaagactgctccattgaagagctgcacagtttggaagtcaagcttgagaagagcctgcattgcatcaggggaagaaaggttagctattttctcctggtggtcgtttttaattttacagcctataatggggtttttaacataacaaatgaattaaagctgcatccatatgcgcatgcacaagcagctcacgacttcatatcttctgatcttgcatggcagactgagctgctggaggagcaagtccgtaagctgaagcagaaggtaagcaccagcttcctgtccatacacctagcgacatagctagaagcatcagaaatacacggttcctaacttgtgcttcgttttatgttcacatctgtgtgtcgcgtcaacgtcaaacaggagatgagtctgcgcaagagcaacgaagatttgcgtgaaaaggtaatggtgccgaaacatcttacagccatgaggaccacaagacgctgcacgctttgattatactgcttacctcgacatcttatgtgcatatacagtcatgcatggatttctctcaccaattcgcgtgctgcgtgcatctgatggaaaccatgtctgcagtgcaagaagcagccgcctgtgccgatggcttcggcgccgcctcgtgcgccggcagtcgacaacgtggaggacggtcaccgggagccgaaggacgacgggatggacgtggagacggagctgtacataggattgcccggcagagactaccgctcaagcaaagacaaggctgcagtggcggtcaggtcaggctagcagctacctcagccacgcacaggcccaatcaacgcaagctagctagctgagaataatcttttagatctctggtagtgtggagatcgagatgcaagccaagcaatgtgatatcgcgttgtgtgttaccaacctgtcagtctgtgtatcatcccgtcccgtccgtcagagtctcagagaacgaacacttcttctccctgtagctagctgctcctgcttgtgtccagatcttctgttcgatcggttttgggagtagctagggagtgggtgtcgtgtccattgggcgacgcttcggccttctgcaaggaggcttctcgagatctctggtggtggtccccgcacggcgcctgaaattccatgctgacacgtgcatgcatcggaccggaggcagagtcacgatctcttcgccttcggaagcgatgggcttataaccgtccctgggctgaaaggtaaaaggccctctacttcctttgtaggcgatgggctgttgttgcaatagttctatgtaggtaagggagagttgtcccgtgggttggtatcctctaccgcaaaataaaccgatctttagaatcacctcacgaagtcaatattttatagaaaaactataatatctataacaccaaataaataaaatatataaatatagatctatatatatatatatatatataatatctatttaataatattaatttggtgttggttggggacaagtctatggccgaaggatctatggtgccgtttggttcacgaaatataacgtaaatgacaacgataatgattcacactcgagtactatcgataataagtttgaataggtcggtatcagttttctaatgtgttatctcattacgatttgacttaaacaaacatgatttaacattattggttatacattatgttacaaatatgtgagccaaacaacacttatattcataaaattaatgtttagatattttcttagggtaagattcttaatcaaggctgaacaacatgtttagatcttagagtcgagcattgttggccagcattgtagaactgttaggatctaccggtgtcatagattgatcgggcgatttctagtgactacaaccctatataggagattgagtcctttttgttttgtggcggctaggatttaatggaaatgttgggaatgcagattacgctcatcagtttcgttggattgtttgttactgagcaacatgtgtttgtactttgtatg

SEQ ID NO: 506 - protein, 232 aa, Zea mays
MVRGKTQMKRIENPTSRQVTFSKRRNGLLKKAFELSVLCDAEVALVVFSPRGKLYEFASGSAQKTIERYRTYTKDNVSNKTVQQDIERVKADADGLSKRLEALEAYKRKLLGERLEDCSIEELHSLEVKLEKSLHCIRGRKTELLEEQVRKLKQKEMSLRKSNEDLREKCKKQPPVPMASAPPRAPAVDNVEDGHREPKDDGMDVETELYIGLPGRDYRSSKDKAAVAVRSG

SEQ ID NO: 507 - DNA, 4845 bp, Zea mays
ctgcaccgggagagggcgaataaggtttttgggaagcgtcttcgcgcgactgctcgtgatctgctgacctcgtcaacccatctgatcctggcgcgcgccaacaatcagtaagtctaatcagtacgcatcatctgatttggcttttatttcagttcttctgatttggtcatgatttatattcggaatttaatttggaatttgtctaattattcaacaggtgcaatctccggcctctactcactccagatctattcttcgcttcgcctgcaggcagcagtagcaccgttcaagttcaaccaacgcggccaacgcacctgttgaagttgaaccatgcatgaacccgcgacgtgtttatcctccattatccacggtgagctctgaaatccacgttgactcacatacatacacggtacgcgcgtcagggatttcactcggaggcaagaatcgaaaaagaaaaaggaagccacgcgtacgacgtgcaacggggacacacatccacacggacgccgcgacgggactgcacagtggcaatggcaacgcaggtgcagtggtggtggtgttggagtgtttattattgcctcaccgtgtgcttctttttttatgttccagagcaagcacgtaatgtagtaggggcgtagaatctagactatcaaatcgcgaggggcgacgacggtgctcggtgcagtgcagctttgtacaggaacaggactagtcgttttcacgtcgtaacagagcacgctcccgcgtcgatagatcgctacgagcagtcgacagacacggcagcataaatgcgcgcgcaaaagctagtagtaggactaggcctacagtgcagtgcgtccccgagattcattcgtcaagttcaggtcgaccggccggccttgcccttgcattggaaaacagttaccgctatataacaaacagccgcggcgcacggcgagccaagcccgtcaaggcacgaggactgcaggagcagaaagttggcaaccctttgagttcctcactcacacgcgcgcgagccgagagagcatggatcccaacgacgccttctcggcggcgcacccgttccggtgggacctcggcccgccggcgcacgccgcgcccgcgcccgcgcctccgcctccgccgctagcaccgctgctgctgccgcctcacgcgccgcgggagctggaggacctggtggccggctacggcgtgcgcccgtccacggtggcgcggatctcggagctcgggttcacggcgagcacgctcctcggcatgacggagcgcgagctggacgacatgatggccgcgctcgcggggctgttccgctgggacgtgctcctcggcgagcgcttcggcctccgcgccgcgctgcgcgccgagcgcggccgcgtcatgtccctcggcgcccgctgcttccacgccgggagcaccttggatgccgcgtcacaagaaggtacggcgtataggagtatgtactcgtgtcacacacatacagacatacttgtatatatgctcagttttcttctgtagttctgtactagttctgtgtgttttgcctctgcgagcaatgtgatgtgatgatgtggtcgctggtcgatggtcgtgtgcatcgtgcctgcgttaatgcatgcatgcatgcggacagtgtccatgcatcagtctttgttgggactagagtcacgcgctctgctctgctcgcctgtgatgttacttgctcttgttcgatcataccgcaaactcgcagcgctgtccgacgagcgcgacgccgcggccagcggcggcggcatggcagaaggcgaggccggcaggaggatggtgacgacgaccgccggcaagaagggcaagaaaggggtcgttggcacgaggaagggcaagaaggcgaggaggaagaaggagctgaggccgctgaacgtgctggacgacgagaacgacggggacgagtacggcggcgggtcggagtcgaccgagtcgtccgcgggaggctccggggagaggcagcgggagcacccgttcgtggtcaccgagcccggcgaggtggcgagggccaagaagaacgggctcgactacctcttccacctgtacgagcagtgccgcgtcttcctgctccaggtgcagtccatcgctaagctgggcggccacaaatcccctaccaaggtacgcgcgcgcacacacttagggggtgtttggttacaccccgctaaaatttagctcatgtcccatcgaatgtttaaacctccgttccggatattaaatgtagtcggattataaaactaatttgtcagccgaagattaaaagacgagacgaatctagtccagttgattgggtctatatttcatactcctatttaaaagtcaaacgcttgatgtgacccgagctaaactttagcaggagcaaccaaacacccccttattcatttagcagagtaacatttttacatataatatacaaacggcagacgttttctgtatacgaacaactgtcgtgaatgtaccaatctttttaggtcgttgacaagctataacaatataatggtaaagaaaatatagtggcacgcaaagcgccaaagcccgctctcattacctaggactaggaggaaggaagcagcaaaccctttgtagtggaattctatatttcctgcgccgttaagtctatgctagtacatgtactacatcaccatagtatatgcggtcctcaattcaagtactcgtaatgatcgtgtagcacttgtacatacgtactgcttaaagtatattttgcttgagacgcacccgcactcgtggataaagcgagtgacgtgtcatcagtcgtcggtgccaaagcctggggtggctttgtgtcgtcttgtccggccctagggtcagacgggcatgcatggcatcgacactctctcggagtccgtggctgtgtgctgttgccaccggtttcgcgcgtaccagtacgactgtacgagccacgtgggctcgatttgtggcagtttggtggccggcgtacgagtagtctcgtgctcgcccccagtcttcagacggtgtgcgtcgaagtgaaatgaatgcacggtctggcctggacggattccagggtgattggatatgatgatagcttggtgacctactgacctgacccggacggccgcatcgatgcgctcctgcgtctgcgtctgcgccaggctagcccacccagatccagaccgagaccggccaggcgcgcgcagcttgttcgatccgtgagcagctgctgctgctgctgctgcgtgcgcacttgtgcgcgacgcgacacgacacgagcagcgagctgctctgcactgcactgcacgggaaccaaccaaccatggctgatgagcgacatgttcgcgtggcgcgcgcgatcgtgctcgtgctttgcttgcaggtgaccaaccaggtgttccggtacgcgaacaagtgcggggcgagctacatcaacaagcccaagatgcggcactacgtgcactgctacgcgctgcactgcctggacgaggaggcctccaacgcgctgcgccgggcgtacaagtcccgcggcgagaacgtgggcgcctggaggcaggcctgctacgcgccgctcgtcgagatcgccgcgcgccacggcttcgacattgacgccgtcttcgccgcgcacccgcgcctcgccgtctggtacgtgcccaccaggctgcgccagctctgccaccaggcgcgggggagccacgcccacgctgccgccggactcccgccgcccccgatgttctagcgtgcgtcgtcgatgtgtgcctgcaccgtcgccgtacgtctcacagttcctttttcttttagagtgtgaaccaccatggaaaattggattccctctcatatgatgttgccacttctcagttctcacttgtatgttgcgttgcccggttatagtcaggagtgggcttagatttaggcactgtttagttttaggactaaaagctaaaaaccaaaccaaaccaaatgtttccggaagtaacttttttttaaaaaacgactttctcgcagtccaaactgaaaacatggacctgcttttagcggctttcggatggaaatgtgaaaacatatatcaaaaaaatttaacatatattagtggtttccaccaaacggtttttagttctttaacggctcacaatccataatagttttttcatagtcacaaccaaccaaacagaacctaaattgcgcttgatacgccatgtttggactgttaggatttatgggcttggcccaattaagaatttctaataattcgaggaaaatctcaaaagcccatataagtggatggcaaagggataggtggaaccaatagtaccatattgctagctcttgtggagtagagctagcttaaatatggaagccacactcactcaccaagtcatggatgagaggagagagtgtggagagccacacgcgcgcgcgctcggctcgcctcgcctggcctggcctggcctggcctggccggggcgaagggcgcgggcgcacgacatgcgcgtgaatggtccgccgaaatccggcccctcgccttgcgggggcgcggctacctccttttgccgtttgattttttggtttcttggctgttacgcttatcctaaccgatccctataaaatctcaactgattgcgagattttcgtgggcggataagcacgggggtcgcggactcggccctataaaaggagcccggcagccagcctccaaatcatcccagatcccagttcgctttcgcctctcttcatagctgagccgccttttagttcccttcgtcccgaccgcagaggtgcatctgcgatcaggagagcaggtctccggaacccttcgtcttctagatcctgcaccgggagagggcgaataaggtttttggg

SEQ ID NO: 508 - protein, 391 aa, Zea mays
MDPNDAFSAAHPFRWDLGPPAHAAPAPAPPPPPLAPLLLPPHAPRELEDLVAGYGVRPSTVARISELGFTASTLLGMTERELDDMMAALAGLFRWDVLLGERFGLRAALRAERGRVMSLGARCFHAGSTLDAASQEALSDERDAAASGGGMAEGEAGRRMVTTTAGKKGKKGVVGTRKGKKARRKKELRPLNVLDDENDGDEYGGGSESTESSAGGSGERQREHPFVVTEPGEVARAKKNGLDYLFHLYEQCRVFLLQVQSIAKLGGHKSPTKVTNQVFRYANKCGASYINKPKMRHYVHCYALHCLDEEASNALRRAYKSRGENVGAWRQACYAPLVEIAARHGFDIDAVFAAHPRLAVWYVPTRLRQLCHQARGSHAHAAAGLPPPPMF

SEQ ID NO: 509 - DNA, 10339 bp, Zea mays
ttaaagaacaaaaaaagtatcttcattatttctttatgtagtaatccgtatacttgctttgcctataaattagagtgtattctcgcttcctgataagttcaaatatttttttgacattgaccaaacatatacaaaacattattaatatttctgataaataataagtatcgttgcattaatagttacttatttgaatatgtaaacattaccaatatttttttgaacttcaccaaacaagttacagccaccaaataagttgctttgtaccaaaaaagttgcagccgccagacttaacactgcacaccatcaaaatcaacgtttcagaccgttagataaccaatatcctttactcattcaaattcaatagacaatactatttggattatctctctccctcacgtcctcggcgcccctctccctcactcgcaccaccgttgtcgccgtcggcaccaccgtcaaccccttccctcgcaccgccaccggtattgtcgacctcttccctcatctctacgggatcatagcgttagcacaaactatatgctagtagatttaatgatctagtgtagtcaaattaaaaaaaattagtgagttactttggtaaccaatagcctccttttctagtatctgtacttccctagagcctagacaaggtgcaagaggaaaccaataaacgactcccaaatttttccaaaaggtttgcacagctcccaagtaaaagctcagttttagtacccgtgcaagttccacgtaggaatttaacagcaaatttttttttgattctttaacaacaaataaataataaaattagtccatctagaccctgtacagttcccacacgtttcaaacggacgaaattaataattacctaaaaatgtgcaggtcgtagcaaagtataattaaattaatacgaaagaataggcacggaaatgccggtaccaaagatataaaaaagggtagaggggaatggaagagtccaggagcaagaaacactcagaagctgcccagagctaccacccttcttatccccacccctcctcctcctaccttttctccttcagacctcaaaatctgtgtgtctcctgccgcggctagctgataggaacaagagcatgcacatccgagaagaggaggctacaccatccacagtaacaggcatcatggtgatttcttgttcttcccattggcttctttaatttggagcagatccacctctctgtgtcgttgtcgtctcctagcaattcttgagcgtggttctcttgtgtgcagtcgaccctgacttcggcggggcagcagaagctgaaggagcccatatcccctggtggcggctccgcgtcggtcgctgggtccgctgcggagaggaacaacggcggcaggggcaagggcaagactgagatcaagcgcatcgagaacacgaccaacaggcaggtcaccttctgcaagcgccgcaacggcctcctcaagaaggcgtacgagctctccgtgctctgcgacgccgaggtcgcgctcatcgtcttctccagccgcggccgcctctacgagtacgccaacaacaggtctcttctttctctccccagctctgtgcatctctctctctgtgtggtactagctagctagtaccgcaatataatggtagtaggcgctactacgacgaatcaccttcgctccaagaaatggtaggctacatatataagtgatgagtttgtcgtcccgtctagctagctagacacatgatgtgtatttcgacgacgctctccgagaattgaagcagcaagttagctcccagctttcttgcttgcaaagaggaaagctgcatctcgtttgctgctacgactacatgcgttctgtttattaactgtcttgcttattttttgtgctaccgcggagaggggcgaaagaaatcgcaacggtttctttgcgcgcgtgcgtgctccgtcatcctttccggtttctcttgtgttcctgtgaggtgagctagatgtctagatagattcagcgcaggggtatgctttgtgaggtgagcttttctagtgcgcgtgcgtgcaatgggcgggtgccttgcggttgctttggtttggtgtggtggtccgcttcttttcttgctccatttaattatttctttcctttctatgatctatatatccctgaggaatatcagtgaagacttattagatctctcatacctcatgatacatagcaagcattgttctcacacaaggaaaaaaaactttttgttgctttggtcatgtatatatgtgcagatctagtaattattatccttcgctcttagatttgggtcactagctggatgtgcgcgcgtgcagtaactcggtaactggatgcaaacttgtgaatgtgagtgaggggaggtaagcatttgagacgtaaaaagatgccaggcgcgcatcctgtcctgctagtgctatatgatgttagggttagggttccatcccatgtgcgtccgtcgtcatcatcaccatctggcctctctctctctcttctctctctctctctctctctctctctctctctctctctctcatgctgtcatacattgtgttttctgtagatgttactgttgtccctgcgtgtgtggtggttctgcaggtctcctcgtcacagccatgtatatctgcgcgcgcgctgtgcactgtgctgcatatgcatatgctaaagtgatgcgcaactgcccatcacgggagctctgtcctctctgccaccacatagcactgtagtttttaggactggcaggaaataaaaggggggtaatgtaatgcagaaggaaacgataacatcaaattgaaaacaaagaagcaacctagaaacagcgtgatagcaaattaaatttccttaggcatttgtgcttattttttaagatttctttatcacatccttatgttgcacacgtacatgcaatgcaagtggcatgagtgaacgaatatatagattcattacagctttgacaaattggaaccactccatctgattgaatgcgtttgacttgtaaactcaaaggacaatatgtgttgtgtttcttcgcagaaatttgagcattatgattgggttctcgtatcttcaagtgaatatttactgttaatagtaatagtagtgttcatcacactgaaccataaatttgagagaaacaccattttgtaagtaatcaaattacttttcttgaacagattccaaaagaatcaaaatttcatctatattgttgcaatattgaaactaaaaagtagctcggatgcattagtcaacatggtattgcaaatatttgtacaataaaatcatagttttgaaactgttgtatctatatggtgtttgattggttacttgtgtttgcaatgtattcaggcagtgcagattggttgtatttggtttgccagacatatatagtctcttattcatgcttgcactttgctcaaagaaagcacaataatgcatattagctagtatgccagatttggtcgtacttagacaaggtttgcacaatctgatgggatggtcatacaaaaataaaacaacctcttccctttacatatactaaaaatatgagaactcaaatagaacatggatcggaggtagcaataaagtgtgaagaaccaaacatattttttatacactgcatgtgtttctgatcgactcaggttgcattgcataaggtctaatgcagagaagactaatgcaagcaaacaattagagccataacatcttataattgatataaaagtatacctatctatttcatgataattttaaatataaaaggtttgctcaaataaaaatgcaaactataattgattttttttttgctcaaagctcgacggaagccagatgttcgaacgggtgtagctgcaattcatagagataaaacactgtagaaatattagagcgacctgtacgaattaaagtcaatcgacgctatagatatatatttggtctttgagggcgtacggggcaactgaaatgtgtgccaatttgtttgtgtgatgtgaatgctctgtatacggaaccagtagcatgaccagttttccttgccactgccagagttgtatcgggggactacaaggggaagaaagctggcaatgcaagctggtgttggtcagaagggttatggcacccaacggtagggctgaccagttgggtaacagctgagtccatgtcttatctatgcagcactcctttgtgaccaatgggtagtagatgtccactgcttgcaggcaatcatgttgtgggtaatgcatggctactgccaagcatgctcgaggatgctaaggtttttgctatgttcacctacagagtacagaacagcagtacctttgaaattggtagccatccgtctcaaaattcgttctcattttcgaaaatgcaaccattttaaacttacaaatatatataataaaatattaatattacataattagtatcgttagaagatctttgaatctattttcataacaaatatttttaaagatacaaatattacaaatatttttttataaatttaaatcagtcttgacaaactttgacctgcacgaaatgacttagacaactattttagaatggagagagcatataaattatgtgagtcaaagagtttcttagaaataatggttggcactaagtgggttctacattattgcccccataaatatttctttgaagcactgctattaaaatgcttggcctccgcgatggatgttatgagttccaaaaaaagtgacgagttcctgttaatctgtgtatggcaactgcaaaattggcatgtttagaaaatacatatctcgtgtaagcatagggttcaaatttgagtcaagatgcatgattcatgtctcatatttcttttagctagaataaaagtggtatttacatttcctttttgaacgtaagacatttacatggatatgtcatctttttctgacaaatatttagacaactgttttttaccatcaaagctaattaatgtgaataacacatcattttttagattagattgtttaattttttgcaatgaaaaaatcattcctttgaagaatcatgtgatccatctttctcctttcacttccgttgcaccattaacataagttatttaacaatacaatccatatgttcctttaaatttgtttatgtcctatttagtaaaaatatccacttaagcaacacaaagagagctggctcaacttaactgtgaatgcatcgaatccactaactattgcgcttttggttattatcaacaacaaatatttttattaatatatcaagataatctatattttatcagtttctcaatgtttcaagatttaaaaatataggtcttgagttttttttcttgagagggtaattttaccaggatgttttttggttcagttcaaaatttaattcaatcctaatgtttagatctagaccccctttttttaaacagttcttgtaggatttgactttgttgaagaaaacaaggatgaatttttttgctatgctagcttaggagttccgattttcttaaaaagaactgtagtagttattaggtgtggtattacataggttcaaactccatgtatgtgcactacaaacatattatgggtctgtttggtttagctgtagattcctaaaactctgattctagctatgagctgtgagaaagctactatgaactgacaattatgagaaaactgaaattaatttggctgaaacaactgtcaactatagattctataagagcatgacagcttgtaacatagacatcatgaatccataaaatctagggtaggaggtgattctgaattgaactagaggaatctatagtttatctattctactattgtatatgtttgattgagatttcagattttggacagcaaatctagttcagaaagctaaaccaaacataccatataagaactcaagttctatgtagatgcatcagtatttattagaatgctaactcaatggcagttaggatttgattatgctggcaatgcgatagtatacaatattagactattagtgaagagtgaagcagtaatgtaagcaatgcatgtgcttactaaaacgtgataaatcattgttgcaccgaatattaatacacaacattaggatgtgcttgcacttcctgttattatctgtagcattgacgaggaccactctctattttcacatgacactaaataatgtgttaaaatcaactacttctaagtgattgcagcagtatttaccacaccaaattaatatcacaaaatagattatgaaatatattttcataatttaaccatttagagtcctagatgatgttactatttaagtgattgctgggatggctttactttagcatggaagtattaatagtattttgggacgatgcgttagaatattggttactttatgtgctgattgtattgactttcactaatggggctgttctggctagattattaaagccgttcggactgctgctgccgtatagacaaaatactgtagaaaaggtagaagccggtggattaaagccgaaatactgtagaaaaagtagaagccggtggattaaagccgcaacggacaggatgaatgtcaaattgtaatcgacatacttgctagaaggcaatgtatccattataatcgctggaagatgtcaaatttcagttattgtatatgttctatgaatctccattataatttattatgcttgtgacgattgttctattatctgttgtattttttcaagaaaaatatctagttttgccctggaacaattttgtttcatattttcattctttcggcacatacaattatctcacctgattgaatgtatgtgtactaactactaactacagtattatattgtatgtacagcgtgaagggcaccattgagaggtacaagaaggcaaccagtgacaactccagcgcagctggtacgattgcagaggtcaccattcaggtaacatcatgtcgatcagtcaacacatcgtttctgatcctacaagaccctagtcgtagtgttggctaccacaggctatgctgtctattgatgaccctagtgttgtactatgcaacattccttgcaactgtgtgctctacacagccaaaatattttctctgggcgaaatcttcagactggacatgcaccctgtgggttctgggcattacacggcagaaattccagtgacgatactaagagaacctgcttggaccagcatttcatgtggagttgtgcagatatataattgtcctctctggatgtctgggtagctttggttattccatgctccaaatggtagagaggatagcatgcatgttttggacaaaaacgaataaaaccactgaaggctagtaggaaaattcttcttgatgggttttcgtaagatgtggcaattataatattcctctgataaatatatatatggctagtaggaaactttataagtatatatatggcagtcagtttggtgaaatggagttttagtgttgcacatattttcttttccctgaaattgatttcgatgaataaattaattggactacttttgttttttcttgcaattgagaaatgagtacaccatttaattcacattttgcagtcggacctgtttgttatgaatgtcaatatggaacatccactaacaatttggatagaaaccaacagcagcatgaaatattactaaatgaacttttgcaaacttgcagcattacaagcaggaatctgctaggctgaggcagcagatcgttaacttgcagaactccaacaggttcagttcttatagaaaattatcatgtgcgcgagaatacagaaaggtcatttgatgaacttataagttttcagggccctgataggtgattctatcacaaccatgagccacaaggaacttaagcacttggagactaggttagacaaagctctcggaaagattagagcaaaaaaggtactacgtgctatatatctataataatcatatttactgcattatgtgtggaaaaataaatatagtatttccttttacgcaattaatgcggatcaaactctgcagaacgatgtgctgtgttctgaagtcgagtacatgcagagaagggtaaacagcaacaagaacacatttttcctctcacgaacttattgatttactcgacattgaacaaaataaaaacaagaatttcgcattttcaggaaatggagttgcagaatgacaacttgtacttaaggagccgggtaagtaacctgtagttgctaattaagaaggacagtcttagaagcaaaatatggaactgtaattactaaaatgccaagtttaccttaactttgaaaataaaaaatagtgtaacaatttaactgtctcacaatgcaagcataggttgatgagaatgaaagggcacaacagacagcgaacatgatgggggcaccatcgacaagtgagtatcagcagcacggttttactccttatgatccaataaggagcttcctgcagttcaacatcgtgcagcagcctcagttctattctcagcaggaggaccggaaagacttcaacgaccaaggtagattttttttttatatctaccacatttatttgaaatgtatttaaatggacaccctaaggtatttcataataccatgtatatttttctaaatgaaataataatccctccatctcaaattattattcattttaattcttggtttttaagaatgatgatgaatctagacacatacatcaattattaactgtacgaatctattagaagtttaaaatgaattttaatttgggacagagacaatatttattagtcatcacaaaacttggaagccatagggctaggaaaacaaaatcattgcagttagttttaaataaaatgcctaaaccttccacttggctatatatatatatatatatatatatatatatatatatatatatatatatatatatatatatatatatatatatatatatatatatatatatatatatatatatatatatatatatatatataatttcctctccaagtacatgttctgctattctgattccttttaatgtctttaggtggaagataaatattggacctctcaagcttcagtacttatccgtgatgatgcatgactgccagtgagaaactgagctacattactgtggaattatatgtaaagactagtactactgcttcatatatgtgcatgtgcgcacacgcgcacgtagtatgcacaatttcatcccactattatggcttggcaccaactatgtctccttaattatcataggagaaaaataagtcacgcacaaaaaaattctaaagatgaggcgcagtgttggatgactgaaactgaaagataggattctcgtggatggcggtggtcatatatatgtcatgcacatctgatctctgttccaaaatgccacatcttctttcccaacccactcgaatctacaccgagaatatatatgttttattcgtaatgtatagacactattagcaatgatactgtgaactatggttatggtccacaataagaaatgcatatttacctgtggtttcatagtagaaatcatgtatttatgttgatgatcttcataaaaaatgttaggaaaaatcaaatttcaccaacaaagatgtatttctaaagatgggtttgaaagaaaagtggaccgtgactatttgatagttaaaattttgatgtttgatgatcaagcacaaccatttagactaacattatcggctagttttttttaatttaagggatgcaacatggacatggactgagataaagtggtgatcaacactacgggaaagcgggccactatggacgccctacataacttccaacggccgactcacagtctgtcagaaattaactaacttcctacggctagatgatagaccatcataaattaactaacttccaacgactggctgacaggtcgtactttccgacgacctatcagtcagccactagagtcaaccactagacgttggttaattaccaacggtctagcaaccaacagttcactaccggaatcacaggctttgccgagtgcagtacgctttgccgagtgccttttgtcgggcactcggcaaagaaggctttgccgagtgccgcactcggtaaagttaggaactcggcaaagagcccctttaccgagtgctgaacactcggcacagggggctctcggcaaagacacgttttgccgagtgtcaaacactcggcaaagggggctctcggcaaagggccgtcaacggccgtcccaaagctgacggccgttagtcgttgccgagagcctacggctggcactcggcaaagaggattctttgccgagtgtcatctctagacactcggcaaagtatatttttatttttttatttt

SEQ ID NO: 510 - protein, 286 aa, Zea mays
MHIREEEATPSTVTGIMSTLTSAGQQKLKEPISPGGGSASVAGSAAERNNGGRGKGKTEIKRIENTTNRQVTFCKRRNGLLKKAYELSVLCDAEVALIVFSSRGRLYEYANNSVKGTIERYKKATSDNSSAAGTIAEVTIQHYKQESARLRQQIVNLQNSNRALIGDSITTMSHKELKHLETRLDKALGKIRAKKNDVLCSEVEYMQRREMELQNDNLYLRSRVDENERAQQTANMMGAPSTSEYQQHGFTPYDPIRSFLQFNIVQQPQFYSQQEDRKDFNDQGGR

SEQ ID NO: 511 - DNA, 7752 bp, Zea mays
atgtgatctagagctaatcctgactgatagagaatatgctgctgaacatggcaagagagccatgtcaaagaaatccgaatcagcagcaataaggatgccgcccgaggcgcccagagaaggcaagtgaaaagcttgattagcaagcttggcgcctacagtttcctttaataaaacattggaccaattcgagatctttgtctcttgtaggcaaacaatggaagcaccggtggacagaattgtatgtctaacacttgctctcttcgcgtggtcatttagcccccgaacattccaagaaaaaatagcacatttttgattcataaggtaaagactgccactccacttaacacagcacgctgccaccacacatggattagcaggagagcctgctgtaaaatcctaacaggagggagaacctccaaacaagggttcgccgagcaaaaacacagcccgaccacaaccgacaacctgaaagaacaacagagatacacaggcatgctgggggacctagaccagcgcccagaagtaataacgccagcggagatacaaccgctccgagagagcctgaccatctgagaacacattggtcaccaaaagcaccaccaaccggcctagacaaagcagctcagttgacccccgcctcgacatcttcgatggccggcatcacctttctccccttctttttattcttcgctgtcttcaccttgtcttgatttaacagctccatgattgcatccatttgcttcttggagagaggctttgtgagaaggcttgtcatctgctcaaatgactcatcaaagttagtacattttgaagaactaattattattatatagaatgcactgcacatatattactattaccagttttcttgggcacagcagaaaacatgcacacgcagatagaaaaaggagaggccataaaccaaaaggctttaagaatatatgtaaagatatgtctaaatatatggctatatctggttaagcaagataacagggctctggtcatcagtagtagtggccttttgcccttgcccctctctctcacctctcttttctcagccttgcttccgatggatcccatcccactgccatcctttctttcccttgcgcgcattgcctagccggccggccggcctgctattaaaccactttacccgccccctctcgctcacgctcgacgcagctcccttttccttgtttgcttattgcaagtctctgcaagaacctgctagagaggaacaaggtagagtagtatcgcttttttccatctaggttatctctttttacatgaaaaatttcagccgtatttcgttctccatcagtcctgcgataatatatacgcgcgtcttgtgtgatccggcatatgtatagttcctgctaactgatcgagatcgctctcgtttgtactttctccctttgaggaaagagtttccccttttctgtgcttcaagttcttgtaaggaaaaccatgcctgccagcttcttctgctacttgtatgatgattcttatttgcttattacttgatttccgttttttttcttgctttctatatgtatgtatctgggctgtcttcccctgcgtctcgttactgctaagctttggaaggtttcaactctttgtatacgatgaggtttctgctcctagtagcagatccgcgcatatgactagatgtttgaggaaaagaaaagggcaagacgctatatatatatgcagcacgcagtcgcacatatattcagttttccaatctgcctcttgctttatgataattcaacttgcgctgattatattcttggctacctagaaatgtctaattaaactttgtttgctagctagattttgttgcttcctttcgcatctgatctttttatctcttctgagtgctccgcaaagccttccagtgttgaagaagctgctggaagaacgaagagatgagctttctcttgaaggaaaaagagatgatcattgctggtttgttgttgtttcgtgtttttttagcttcttgtcccccatttatatttcgcgcctaatgaacgagctcgtagatcttgtgttcttgtggctggttttgttggatctcgatctcggttacgtttacatgagtctactcttgcctaacatacatctgtgttctttttctaggctgagagaaacttaactgatcgagtctgcctggcaggcatcgatctatccagtcgtcagttcgtcacatccgctttttcgtatatatcatcttcagattttaattgtccatctgtcaaatcatggaaaatctgtcgtctttgcttgtattctcttctgtcattcctgctgcctccggcggatcaattcttgaatcgacccgtgttcctattcccttttgttagacagcccaaatcgcttgctcgatcgtagtgtactgtactactgcggctagctagatcttccaagctagctagttcgtcggtccctttgatctgctccacttgaactcttttgcgcttatgagaaaacttgctgctttcagctggtatcgccagcatgggtaggggaaggattgagatcaagaggatcgagaacaacacgagccggcaggtcaccttctgcaagcgccgcaatgggctcctcaagaaggcgtatgagctctccgtcctctgcgacgctgaggtggccctcatcgtcttctctagccgtggtcgcctctacgagtatgccaacaacaggtgagtgagccgtgtgaggtgcttagatcttggacaccctggtgaacgcttgatcatttttcagcatgtcatcatttcatgctcaagtcatcgacttgctgattgcgctgttgcgttgcgtcatgggcactcagcagaaaatggaatcttattcatttgtagtgcggcggcgcttgcgggatttagttcccgtttagaagtacccaatttttaagaaacagatttatagaaatttaggtagtaccaaacataccaatttatggcttagtttataaaaattggattactagtttcttagaaaccaagaagttgacctttcctaacttaaagataaaaactggtttttcaaacaacatcttagttcctctctcatcggtagttcatgaataaattgattagtaaggatttctaaaagatacaaaaaatcgtcaaaattgtcatatgttcagtggtcagaccatatatatatatatatatgtttaggagttatttcttcaaaattatgtgatggacaggaaagggcacagcgttcatcatgtataataatactgacagagacgaccattttattgccatgcaaatttacacaaaaaactaccacatgcttattggattttcctcatctgtgttagctaatataatgatttatcttgttaacccactacatgttatcgagttattaatcatatattgcattgtcatgtgatatatcttgtttgtgcatataataccgagacaaggattgactgactctatgtacacatgaattggaacgtaaccgtgcaaactgcaaactagtgcttctttcatgcattgtttgctattcaaatactactgttattagattttgattttagatctgagtgttcattcggatctatgtttttagacagatttagggtacatttggttggagagtcaactagaatagagtgactccattccagttatttagaataaagtcattcaattctgcgtttggcaagccgaacagagtcattctatttttttgtttgatcgaagatagagtggagttgctctgttctttatttggatggagagtcatatgaatgtagagaagagggagagggaggagagtgctcgtatccagtcattttggtggagctggagtattccaattatttacggtaaatttttatatgaagactttaggagccgctccacttcttttttgttgaaaaccaagtatccagaaaacaagaatagatcaactcctcaaccaaacacacctttactctctccctcggtttgttttggtgtgatttttaataataagttggtctcatcctcttcctagaagagataaaaccggatgtttaattttcatggcataaaaaaaatgttatttagattttcagagctaaaacatccgtgctctagtttccacacactaggttcaacaaaatcgataagaacaagaatgcatttgcgtagtggtagatgaaagtttgtcgcactgacgtcttctgccctgtcaaatgcctttacatgctcctcggtctctctctctcacacacacagaacacaaaaaaacaaggtcttcttgttgcactgtgtccgagaggacgttgcaacgtacgtactgacctgactctaaactagctgtcaagagttaccctttgctcgcatcccgctagtaccagaacgtacacctcagtcacctcgtcggcaaacttgcaccggctcacccccccatattcgcggtgcttgctctcccctctccgatgcaaagcgtcaatcaacaacaaatgcacgccgcagtgctccattcctctcctgtgcttcattctgccgagcaaaagtttttcaacagcagcagaggggaacgatgacaacacacacacagctgcattttattctttcaaaagtttcgcaatgggaagcttgttcacatgcatgcatgcatgcattgactgggccgggtgtagggaaaattttcacctcacaatttaatagctttcgcctgtttcgtgttgctgtggcctcgagaacacagaaggagctataggctgcattgtcacttcagtattactgacaacacaccatgcatgcatatgcatcctccatgccttttgctttgttccactaattgattggtctagctgctgcagtgtcaaggctactattgagaggtacaagaaggcacacaccgttggctcttcctctgggccaccgctcctagagcacaatgcccaggtaatttatacctttgctgttcttacagtaaagtacggtggtcattttatgatttacaatttctttccatacacgtagccatccatatgcatgcattgagagattcttctggaagtaacttaatttgacattagtactagggctgtagcgcatatgctaaatatatacacatactgaatctatatttcttgatgatcatgctgatcgagaaccaatagcgattgaatgacccggaaatttctaaaactgaaatagtcatacacctgaacaaagtagttgtcagaccccctcaatattccatttacttaatttggacttggataatgtccaaaattatgagatccatgcatccatctgatcctttcctccaactctttgttttatatgctgaagcaattctaccagcaagaatcagcaaaactgcgcaaccagatccagatgctgcaaaacactaacaggtacgtagagaagccttgtgcagaatttactctctctaaagctagagaaccattggtaacaactgactgacagtacacacgtactgacgtactgcctgtattctctgattatttttctcccttgtgaaggcacttggttggtgattccgtgggaaacctgtcactcaaggagctgaagcagctggagagccgccttgagaaaggcatctctaagatcagggccaggaaggtaagaaatgtatagcattatccaaaccatcttcaagcaaactaatcatataaactaattaagtgatactcaattctttatatactgtgtatatttggccacatcaattaattgcttcccaagactccttttgtttcaataatcttcaagttctgatgtaattctgagttgggctttggataggttgttgccagacattgacttctgaattcttgtttcagagtgagctgctggctgcggagatcagttacatggccaaaagggtaatgcacacataaacctcattttagctaaccctattggattcattcgtttgcatcatatcatgcatgtccgcaggagactgagcttcagaatgaccacatgaccctcaggaccaaggtatatatgcttgcttgcagcaattgtagaactagctagaacccaatcttttctttttcttgcatatatagccacctagaccggaaagtaaagaaaaaactacatgattagtaatcttgagaattatttatgcatctgtggtagctgaacattttgtcaattgtcttgtcagattgaggagggagagcaacagctgcagcaggtgaccgtggcacggtcagttgcagcagcagcagcagctgccaccaacttggagctgaacccattcttagagatggataccaaatgcttcttcactggcggccccttcgcaacgctggacatgaagtgctttctccccggcagcttgcagcagatgctggaggcacagcagcgccagatgctcgccaccgagctgaacctcggctaccaactggcgccgcctggttctgacgctgccgacaataaccctcatcatcagttctaaactggatgcatgcacgagaagcttttcaagcgaactgtgaacgatggaagctggctgttgcctctagatgttcttggcttccatgacctagcttattatggtgtgtattgttgttgccttttgtgtgtgattctccttgctactctactgatggagaactaaacctaatcgattggacataatgatcaaatgctacagatcctgtgatgctgtgatcaggttaaggcaaaacatgtatactgattgcttaaatgggtttacgagtgacgacaatgctatttgttgcttctattactgctcaactctctcttgcttccggttttggacacaatttgtttgacatggtattctgcacacaactttgggtgttggtttttgtccttactactccacagtaagaatatttcaaaaaactgggatgcatgtgttaacgcgatcagtggtgcggaagcaattgtttggaagcttgctttgacctggcagcgttgcgtgttagtactttttataacaatgagtacatggacggccaggtttatctccagcagattatattggctgtagcctcagacgtagctgactccaattcaacatatatatctaattatcaagctaaattacatgcaacgaatatacatgagttggtttgggttacaatgaataccgactttatctaatactccccttcattctcaagctcataagagattgagattgtgcttgagattctccaatttatgaactgccataggcttcttaaaaccatcagctaattgatcatcgatcagacgaaatgaaatcaatgtgaagaagtttatttgctaccatttctctaaaaagtgatagtcaatttctacatgcttcgttctcccatgaaacgatggatttctacacagatatttggctccaatattattacaccatattctagcttgaggaggactagggattccaatatctttcaacagaatatatatccacataatttatgtcgcaaccttagccattgctttatactctgtctccgtgctagatcttgatacaacgggttgtttgcgtgcactgcaagaaattaaatttgaacaaagaaacacgtcaaatcccctatataatgccagtaatccaaacaccctgtcaagtctgcattagaaaaggcacttacaagaagagagttagacttgatggttctaagtccaatatttgcactcccctttaactatctcaaaattcccttcaccacaacccaatgttcactagttagagcgtgtaaatgccgacaaaccatgtttacatcaaactaaagat

SEQ ID NO: 512 - protein, 269 aa, Zea mays
MGRGRIEIKRIENNTSRQVTFCKRRNGLLKKAYELSVLCDAEVALIVFSSRGRLYEYANNSVKATIERYKKAHTVGSSSGPPLLEHNAQQFYQQESAKLRNQIQMLQNTNRHLVGDSVGNLSLKELKQLESRLEKGISKIRARKSELLAAEISYMAKRETELQNDHMTLRTKIEEGEQQLQQVTVARSVAAAAAAATNLELNPFLEMDTKCFFTGGPFATLDMKCFLPGSLQQMLEAQQRQMLATELNLGYQLAPPGSDAADNNPHHQF

SEQ ID NO: 513 - DNA, 3395 bp, Zea mays
atagcttgggatggcatgaggcgagacctctgcccctttatttataggcaaggtggaggattaggggaggagacgagaattagtgagagataaacatgtattagtcatgtataattgaaattagcttgtagatctcactatatgacactggaggtgtatgcatacgtatgagcatgaggaaaattattaagaaaatatttgtagggactttaaaaatgattacgagggtatttctgaggagaaaaatattttgagaaatattaatggaatctttaggcagtatttctggaaagaatttgatggagtcactggaaaaatatttgtaggatattttgaaaagaattttggagagaatatatagcactatattttatttgttgtgatgaacttgcaaacaaacatttgtaaacacaattttaaaatccattttaaatttaggactagttcaagtaattttatggttttgaatttttcggaggctataatcaccctaatccaatgagtctctacttacgcgcttgctttccccttaactctacaaatttctcgagtacctaagaaacactaatatcgtcatgcaacgacaatgttcatctaatttttatgaaaaatttatgcctattggacaaatattaaggttggatgaaatagtgagaagttaggacataattatggtcacggttagttttaatgtatgtcccctccacgtctataactcttcttttactagtagctacaatatctaaaacttacttgctataactgagggtataatattcctatggaagtgttagtagcttgtgaactttcttatggttaaaactgtctatccatatttaacgtgattggctgtttatttatttagtattcattttagagtcagcagtgatttagcggagaaagggagagtctgggcaattggcggtctctggtgtcatttgaccagtgccaggtctcagtctgagtctatagtcaacagtgatctctcggtcattggttggcagtctcaggcacacacaatgacacaacacaagcagggcacagtcacagtgtgagctgagctgagctgggcttgtgcttgtgcttccgcctcctcctccgcggctactaaagggtgccagccagccagccctgtggggcgccggtgcgtgcccaaaacaagcaagcataagcatagaggtgggcatcatagacatggaggatgacgaggacatatgggcaaacaccgccagcagccccagcgcgtccccaccgcagcccgtggcggcgggctcggtctccacctgcagcgccttcatctccacgcagctgagcctcaactcccgcctccacctcctctcctccgccgcggccgggggcgggtcctccccggtccgcggcggcgcctacggcgcggacggtgtccgccaccaccacatggctctcggcggtggcttccgcaatgccgcggcgtcccaggggtccttctttccgtacaacctcgccggcgccggcgccgatgtcgcgcccttcgacggcggccgcggcgtgctcgaggacgacatgtctgtcggcgccgccgcgtccggcacctgggctggcgggggcaccgaccggcggaagaagcgcatgatcaagaaccgcgagtccgccgcgcggtcccgcgcgcgcaagcaggcgtacgtccgcgagctggagacgaaggtgcagctgctgcagcaggagaacgagagcctccgcgtcaagtacgacgaggtaagcgggacatcgagagcccccggcccttcatatatatggtcgctttgctcaaagctcgcgcgtggattgggcagctgcgggagtccgtggaggtggcggtgccgatggtgaggaagaccctgcagaggatgccgtccgcgccgttctgaggacattgaccggagatgagtcgaagcaggtggttgctcgttttgtttgttttttgaggaggtgattaagtaagtgactgattagtgagtggctgctgcctagtgcttggttactagtagtggtagaactcagaactacatagatccaggaagcaagcaagcaaatccttcctgccatggcggcctcaatgtacatagatcccatgtttttattaatttcgtctagctgggggggcgtgcacctgccatggcggcctcctttatttagctttatataagtaggatgtaggatgtctaccatatgtgtgtagcttgggattaggctgcaagaagataagcctgcttgtacaaatatggcttcctggaacaatgacattttgggggcgcaacgcaagaaagatgaaagaacaatccaggaagcagcaggtgttttcttcttcttcttcttttgccccttccatgatattcgcgtgtcaaaggctctcctaaagcgagtagtagtcttttggtttggtgaatatttgctgttttcatgctggtccctgctgatgtttgcgatgattttacaatcagaaagagacgttttttggttttgcctccattctctttttgttgctcagctttggcgagggggaaagccagtaatttcgacgatagggaacaaaaaatggatcgaattttgggacccctttgcttttctgaaagatggaacagaaggcaaacaaatcctgactattgggaggatctaatttttccttttttagacaatgtagagcagctgcttccctacaccaggcaggaggcactggaccacagacacgcaaacagagctgcaagtctgcctccccccaagcaccctgctccctccgatctaataactgattttaataaatcaatccattaaagtttcaccatatatatatatatatatatatatatatatatatgtaatgttgatattcattatacgagacaagtatcattggattaatctgaaaatgtattttttaacaataaatacattaagagatgcaaagttttttttttgttctataaacctcaacttacttaattatatgattacattctttctaggaataagtctatatatataatcccctgtcgtttgacatcatagaatgtcctttgaaaatggaagcttaaccccctaaccttcataatgccgtatatagctggacaagatttctttgcttgagatcaagggttacttaagggatcacatgccagttactgatctactactgttgcatcggttgaagcctgggatgcagttaggtgatggattggttttgttaactgatgatgtgtcttgtaaaaaaatgtctgatcacacaaccgatgcgcggagtagcagatgtgtatgtggagggagtgaatttgcaagcgaatgaatcatctgcatgtctccttctaaggatccaaaagttgacagcatgtttacaaataaacaagaagaagtgaaaggagattcaggtaataaacagggaa

SEQ ID NO: 514 - protein, 204 aa, Zea mays
MEDDEDIWANTASSPSASPPQPVAAGSVSTCSAFISTQLSLNSRLHLLSSAAAGGGSSPVRGGAYGADGVRHHHMALGGGFRNAAASQGPFFPYNLAGAGADVEPFDGGRGVLEDDMSVGAAASGTWAGGGTDRRKKRMIKNRESAARSRARKQAYVRELETKVQLLQQENESLRVKYDELRESVEVAVPMVRKTLQRMPSAPF

SEQ ID NO: 515 - DNA, 3537 bp, Zea mays
acttcaacaagagtacaagatactaaccctgtctgaagcaagtccccttgtaaatgatgttaaggcaccatggctcaccgccctgctacccagtacccagccacccagaaaaataactatacgcagctgcaagttttttttcttcctattcttactttaggacatctacaacttctgaattcaaatgaagaaacaacacccatgcaacaaagagagcacaaaaaaggcagtaactactaactagtatcacactacctcagatctgcagaagttgcacacaacaaaagcaaaggcttcagcaattcatttggtgttaacagaagagtcatgtcccttccatgacgagaactacctcgtcagcatcagttgaagaacttccagtcatacatggtgttaatgcacccaatatcacagtcgaagctttgcaaaggggacgtgttttgttattcctactgtaatttatctgcgatccctaggtttaaatagtacaagtcccatagatagatcttctgtacaacatgtgggttctcaacaacgggaaatacaactcaaggacagtgtatggtgtttacgtggaaccgcggaagaacaaacactaaggtatgcagcacaaatttcagatcagacgaaaagagaaacaagacaacactacttagatatttaacctaatatgctcttgcaagaaaaataaaacatactaaatacacctcgatgttcacaccactacagttgactgcactaaagctgccagtagtttgcgtgctttgctccagcaaaccccagcaatgttttaataactaagttgctgaagcatatcactgaaaagactatgcagactgactacactacagagatcatgctttgacaaagtacgttaaaaaaatcatgctttgacaaagaagcacacttcagctatctgggtgacgtatgacatcacaatggtatctcaaatgctggaagttgaataagacagccttcctcaactccagtataaatagttcatgctcaggctgcagcttcctcagtcccatagggttatttttctgcagtatttgtcagcaaccgatcctttggttatggctcgtgtcctacaggatgtgttggatacctttacaccaaccattccactaagaataacatacaacaatagtcaagttctggcaggtgctgagctaaagccatctgcggttataagtaaaccacgagtcgatatcggtggcaatgacatgaggactttctacaccctggtgagccaagcaatttacagataatgctacccgattgggagaatgtatgccaatccttttttatgtagcatataaagtattgtgcactttatagtggatttatcagcattagtatgaataaatttaataagaacaaaatgccttaaatcttgcagtatataaacatgtctatatgctaacatgtttgtctttgacttgagaaggtactgattgacccggacgccccaagtccaagccatccatcactaagggagtacttgcactggtaaataaagtgcaatatgtcccactcttcctaaattaggttctttttaatttgccttattatgatattggttcactattgtgtaggatggtgacagatattcctgaaacaactagtgtcaacttcggtatgaatgcatatagttatctgtcattccgttgcgtttctgctgaatactgtggagcttaggctgtagtctcttcttgcttctcggacttgttgaccactgaattggtgcagataatgatgcaatcaatacatgaaatcagcaaccataaactgaatgctagaccaacttgttaggtgaatgcaatatcccagcttagcgcttactgaaagccactaacttagtagcataactaataaagcaatcaggtagaactcagtttcaatctagaccattgccggagtctggatatattggtattaaatacaaacaagtatttaatagtgtaaatgaataggtatacgtatgattcacaaggcccatgtttgtcctttaattggttggcaacatcagcaaaattaggttcatttacagtggtcatattaaagttatattctagtagtacatttttagtatatataattttttcatgcttggttttacctgagactttgaaacagatattggaaacaaagaagccattaattgtctcaaacaagatgagctatatctaaaagacatctctttgtccaaattgaaagagttaaaaacaataaatgtcgatgtccccacacacttcagtgttccttaaactcttcagtagataatgtcatgatgttcttgcaggccaagagctagtattttatgagagaccagatccaagatctggtatccacaggctggtatttgtgttgttccgccaacttggcaggggtacggtttttgcaccagaaatgcgccaaaacttcaactgcagaagctttgcacggcaatatcacctcagcattgccagtgctacacatttcaactgtcaaagggaaggtggatcgggtggaagaaggtttagggaagagtagagaccatagaccactgcatggctacactatataattatcatcaataatgtgcactatattgaatgtcaatgcaccacctctatatgctgaatgctatgtatctcaaactatgatttgtaatgacttgaaggattgagagcttattctcttaacggaatatagaccaatattattagtatatattccatgattaatcagacaaagtattctccaaggagaaaccagtacagtttcagggccatactagtactgcttgtttcaacaggtattaaacaaactcagcacaatctgaataatacaaagtatatttcatggaaaactaacagagaatcacagattgtatattattccttactacaatcagaagagcacaacacatcattccttattcccattgaaagtattatgccagtggtacgtaccagtttcttagaaagtagtcaacaagacactacaaagcattataaattccaagagttaacttacagcagaatcaccatggagaggaaactaataacttcttctcaagagccaagatggcacacctccaccaattcccatgactccaaggttttatctgtggtatctgttctatagagcgcaagctcagatatctcaaactctaatacatagatatccttgtccagctcctctgccttcttccttgcctcctccttctcctcatctgtaaggtctccatataagaggctgacatgcggcatgtatgctgcaaatgccacaaccaagtgtcagtagtcactaacatatgaattctcattcaggaacaggattcagcgagcacactcacgagtttttctattgtaaccgaagttggcgcagcagtgatcgctagctcccaccacctaacaaatttcagagaatctgatataagaaggccaaatgattccaatgcacactgcatccaggggcggacccacagggggtccaggtgggccatggcacaccctaagccagatccaccaagaccctcacctggcccca

SEQ ID NO: 516 - protein, 192 aa, Zea mays
MLRLQLPQSHRVIFLQYLSATDPLVMARVLQDVLDTFTPTIPLRITYNNSQVLAGAELKPSAVISKPRVDIGGNDMRTFYTLVLIDPDAPSPSHPSLREYLHWMVTDIPETTSVNFGQELVFYERPDPRSGIHRLVFVLFRQLGRGTVFAPEMRQNFNCRSFARQYHLSIASATHFNCQREGGSGGRRFREE

SEQ ID NO: 517 - DNA, 3749 bp, Zea mays
aaattgcatttaacctgcttcaacaagagtactagatactctccctgtcagaagcaagtctccccttgtaaatgatgttaagacgccatggctcaccgccttgctacccagtacccactacccaatccagccacccaggccttcctggtctaaactcaagtaattcagctgtaattttttttcctattcttactttgcgacatctgcaatttctgaattcaaatgaagaaacaacacccatgcaacaaatagaccacaaagaaggcagtaactagtatcgaactagctcagatttgaagtacttgcacagaacaaaagaaaaggctccagccattccttcggtaataacagaagagtcatgtcccttccatgacgagaactacctcatcagcatcagctgaagattccacttattcatggtgttaatgcacccaacctcacaatcacagccttgcaaatgcgacgtgtttcgttattcctactgtgatttatctgtgatccctaggtttaaatggtataagtccatagatcttctgtacagcatgtgggttctcaacaagtggaaatacagctcaacgccagtgtatggcgtttacttggaagaacatgcactgagtatgcagcacaaattttcagactagactagaagagggaaatgtcgaacctgatatgctcttgcaaggaaaacaaaacgtactaaaatgcacctcattgttcacaccactacagctggttgcactaaagctgccagtggtttacatgcttttattactccagcaaaccccagcaatgttaataactaagttgctaaagcatatatgcaacctgaaacaccacagagatcatgatttggcaaagaagcacaattcagctatctgggtgacgtatgacatgacaatggtatctcaaatgctagaagttgaataagacagccttcctcaactccagtataaatagttcatgctcagactgcagcttcctcagtcccatagggaggaagttgagagttctaataagagcaacggccaataccattagcgagttatttttctgcaatatatgtcagcaaccgatcatttggttatggctcgtgtcatacaggatgtattggatccctttacaccaaccattccactaagaataacgtacaacaataggctacttctgccaagtgctgagctaaagccatccgcggttgtaagtaaaccacgagtcgatatcggtggcagtgacatgagggctttctacaccctggtaagccaagcaatttacagataatgataccattttggagaatttatgccaattcatttggtatgttacacataaaagtattatgcactttgtaatggatttatcaatattagtttgaacaaatttaataagaacaaaatgcctaaatcttgcagtatataaacatgtatatatgctaacttgtttgtcttcgacttgaaaaggtactgattgacccggatgccccaagtccaagccatccatcactaagggagtacttgcactggtaaaaaaagcgcaatatgttccacttcctagatttggttctttttcgctttgccttattatgatattggtccactattgtgtaggatggtgacagatattccagaaacaactagtgtcaactttggtaagaatgcatatagttatctgtcattccattgtgtttctgctgaatatagtatctgtggagcttaggttgtagtctcttcttgcttctcagacctattggctaccattgaactgatgcagataaggatgcaattaatacatgaaatcagcaaccataggctgaatgctagaccaacttgttaggtgaatgcaatatggcagcttaccgcttacatgcatagtaatatcatgaaatccactaacttagtaccataactaaagaagcaatctggtagaactcactttcaatccagcccattactagagactggattatcgatattaaacacaaacaagtatttaacagtgtaataaactggtatacgtatgattcacagtgcccctgtttgttctttaattggttggtaaccttgaggtgtcaatttcagcagaactaaggttcatttacagttgccatactaaagttactcaagtacactttttagtttacatagttttttcatactcgattttacctgagactttgaaaccgatattggaaacaaagcagccattaattttgtcaaacaagaggagctatatttaaaggcttctctttgtctaaattgaaagaattaaaaacaataaatgacgacgcttccacatacttcagtgctccttgaactattcagtatataatgtcaggatgctctcgcaggccaagagctaatattttatgagaggccggacccaagatctggcatccacaggctggtatttgtgctgttccgtcaacttggcagggggacagtttttgcaccagaaatgcgccacaacttcaactgcagaagctttgcacggcaatatcacctcagcattgccaccgctacatatttcaactgtcaaagggaaggtggatccggcggaagaaggtttagggaagagtagaaaccataggccactgcatggtcacactatagaaatatcatcaataatgtgcactatattgaatcaatgcaccacctctatatgctgaatgttatgtatctcaaactatgattgtactgacttgaaaggttgagagcttagtctcttagcagaatatagcacaatattactagtatgttccatgattaatcagacaaagtattctccttggagaagcaagtacagtctcaggatcttactagagtacctgcttgtttcaacaggtattaaacaaactcagcagtctgaattatccaaagtatatttcatggaaaacaatcacagcatcacatagtgtatattattccttgctccaatcagaagagcacattataccttattcacattcaaagtattgtgccccagttgcttagaaagtagtcaacaagacgctataaagcattacaaattctcagaattaacttacagcagaatcaccttggagaggaaactaatcacttcttctcaagatggcacacctccaccaattcccatgactccaagcttatatctatggcatccttctataaagcacaagctcagtgatatcaaactctattccacagatatccttgatcagctcatctatcttcttctttgcctcctcatcaattcatcatcatcatctgtaaagtctccatataagagtctgacgtgcggcaaccaagtgtcagtactaagtagtcaatagcatgtgatttttcactcaggaacagaattcagctggtacactcacgagtttttctcctataaccgaagtcggcacagcagtgatcgctcgctcccacctcctaacaaaattcagataatttgatataagagagccaaatgatcccaatgcacaagcacaatacaatactgcatcagcatttcctctggatttcaaacctgctggaagtttgaaactcggagcaaaacaaacttaactacggaactagtacgaggagaagagatgcttaacctcgggggtgggctccagaaggaggtagacgcacacgcactggtagaagaagctgccacgggcaagccccgtaacacggactgtgtaaggttggacgccggcggggagtacctcgacggcttccaagcggctggaactggaaggcggggccgcccggccgactaacgccgcacgc

SEQ ID NO: 518 - protein, 175 aa, Zea mays
MSATDHLVMARVIQDVLDPFTPTIPLRITYNNRLLLPSAELKPSAVVSKPRVDIGGSDMRAFYTLVLIDPDAPSPSHPSLREYLHWMVTDIPETTSVNFGQELIFYERPDPRSGIHRLVFVLFRQLGRGTVFAPEMRHNFNCRSFARQYHLSIATATHFNCQREGGSGGRRFREE

SEQ ID NO: 519 - DNA, 5680 bp, Zea mays
taataatgtgttgccttgttttttattgtgtacaacaattaaaaacgagtgaccaacattttcatgtcagggtatggggacccattggagactcgatatccaaatgaggatgagtatatgatgaatcctatacctatgatgagtataagtatgagaatcaggatgagtataacttcatcagaataggtgcgggggcgtccttgtgggcgtgcctaccgtgcgatcgcacaaggcctccaaaaccatagggccccaaaatttataacaatctttatatacaatataaataaaaaatattattttatataaaatatttaccaacatatagcatagaatcgtaaaagcgttgaaatcgatctgttcttattgttattcaaactatttacctccagcacattgtagtcattagataaaaaagattgagatcttattgtcactatcttaagaagacacagttaaaagaggtagacaatatgtcaatatgctttgatgcaagtgaccaattcgtgacgttgagtttcctctaagattttgtttaaaaaattgctatgttgacattctaaattttataaagcagaggagcaaaactgagtaaaatcgcatttaatgataaaaatgtggaaagtgacaaaactaagaatacaattttaaatagtccaatatttttttactatcttttgcacagggcctctcaacttgggaggacgcttctgggtgtgggtttacaaattcgatgaaaaattccccattgacaaacgataggaggatatttttctcccagcacaaaatagcatagccataaggcaacaaggcatggcaaaggatcgtatcatcgtcatccgagacccattgctttctctctctctcctcgtgctttcattactggggtgggggtggagtggaccagtggagtggagaaatgacaaatccaggcccgcaggcagccccacccaccaaatcggccgagcagggtgcccaaatcaggaaggattttaaggttaaccggctgccaccgcccaccgccggtgaccccagtctctcttctatctatatattacccgcctccttttctcctctctctccgccccaccctccttcctcagctccgttgcgcaccgccaccgccggccggccagccgccggagcaccgaaagacccccgttctttcctgtaaaaaaaaacccgccgcctttagctagctaaccggtcgtcctcttcaccccctagctttgctagctctagctaggaacgaaagaaattaaaggataactgagattgctgattggtggtccgggtacggtgttcttgagtcgtgaagcgacagtacagtggctagggtcgtgccgcccctgcagtctccggggttgcgtgcaggatggtcgtcagggatcgggagtgaggaggcatcagctctcgcggtcgtggagcctaaatgtaccgcaacaacgactcggcactctcctgcttctacctcttcctcctctggttcttcttcttgaagtagacaccaccagttcgccaggtagttagcagcccagttgcgactggggatcggtggcgggctgccgcttgcgagttgtaagcttggaggggaggggagcaggagcaggagatgcagttggatctgaacgtggccgaggcgccgccgccggtggagatggaggcgagcgactcggggtcgtcggtgctgaacgcgtcggaagcggcgtcggcgggcggcgcgcccgcgccggcggaggagggatctagctcaacgccggccgtgctggagttcagcatcctcatccggagcgatagcgacgcggccggcgcggacgaggacgaggacgccacgccatcgcctcctcctcgccaccgccaccagcaccagcagcagctcgtgacccgcgagctgttcccggccggcgccggtccgccggccccgacgccgcggcattgggccgagctcggcttcttccgcgccgacctgcagcagcaacaggcgccgggccccaggatcgtgccgcacccacacgccgcgccgccgccggccaagaagagccgccgcggcccgcgctcccgcagctcgcagtaccgcggcgtcaccttctaccgccgcacaggccgctgggagtcccacatctggtcagtactaccactgtctacaactagccacaccacaccgattgcttccgactctcattaatttctgacacaaactctccgtcttcctcctcttctcccgcgacgcagggattgcggcaagcaggtgtacctaggtgagcaagagcagatctcttttgcgttcccaaagatttttccccttttagttccttatcccatcccatctcgaatggcctagctaaccgattcagtggtggtccggctgctggccgatatacgcaggtggattcgacaccgctcacgccgctgcaaggcacgcactggactggacgcccagaattcttcgtcatgtgagtctctgaccgaattgattgattaacgagtctctggctcctggaactcgcagggcgtacgaccgggcggcgatcaagttccgcggcgtcgacgccgacatcaacttcaacctcagcgactacgaggacgacatgaagcagatggggagcctgtccaaggaggagttcgtgcacgtcctgcgccgtcagagcaccggcttctcgagaggcagctccaggtacagaggcgtcaccctgcacaagtgcggccgctgggaggcgcgcatggggcagttcctcggcaagaagtaagaaccaaccaacgcttcttttctttttcttttttttatagcatgcagtgatgattcaaccttagttgtgcctttcctcctaatcctatatatgtaggatttagtactggttgactatataagtatatatgtattgttcagtaaaagtatacataggttagctgcatgtttatgtatgtagctggttgtttcaatcagaagataaaaaaaaagggaagtagtggctagggaattcctccaatcctcaccggtgggaacgccgtgcttgggtgcaggtacatataccttgggctattcgacagcgaagtagaggctgcaaggttcttcatcttggattctgccgttcatatatgcataatcatgtcttttaatttccaaagggttgagtaccgactcgattcctcttcgtgtcttttttctttctttcttcgaaatccagagcctacgacaaggccgccatcaaatgcaatggcagagaggccgtgacgaacttcgagccgagcacgtatcacggggagctgccgactgaaggtacgtattttctttctgcatatatatatcttcaggtattattggctattaaactgcttggatcttactgcttcttctgcagttgctgatgtcgatctgaacctgagcatatctcagccgagcccccaaagagacaagaacagctgcctaggtctgcagctccaccacggaccattcgagggctccgaactgaagaaaaccaaggcaagcgctaacgatagatataccttgacaagctagtatcaaacaaaaccagtaaaaaaagtttactttcttgtcgaatttcattgcctacctgatgtacgtacttgtgcttctgcacaaaataacgaaatccttttgccctctgatgatgatgcagatcgacgatgctccctctgagctaccgggccgccctcgtcagctgtctcctctcgtggctgagcatccgccggcctggcctgcgcagccgcctcaccccttcttcgtcttcacaaaccatgaggttaggtgacagctactgatcgagatgcagcagcagttcaaacctgtctgttccaaggacctttaggccggattaccaaatcatcggtcaactgtcctgtctgttatatatttatgtgttaatttataatacaagtgtgactatttttcaaaccttccttcaaaatgcatgaaaagagttttttttaacgaaaggcgaaaagaaaatatgatacttgggacaggagcaagcttggatcatcagaaagtattattaattaggatcactgagctgttcattttgttcttgagtcaatcctaatcgtactatgtcagtgaatgaacttgtgttgcaccaatgcagatgagtgcatcaggagatctccacaggaggcctgcaggggctgttcccagctgggcatggcaggtggcagcagcagctcctcctcctgccgccctgccgtcgtccgctgcagcatcatcaggattctccaacaccgccacgacagctgccaccaccgccccatcggcctcctccctccggtactgcccgccgccgccgccgccgtcgagccatcaccatccccgctgagagaatcaagaagccgcactgtaaatctgccgggaagctagcattttccccccggcccctccccctctccgggcgttgcgactttttcagttttgcgccgccggccggggtggtggtttcttgtagccgatcgattggattcctcgtattactgctgcttacactcccaattaagtgaaaaaaaaacgctcctctactctttacactacacacactgttagctgatcgattggacgtacttgctagctgctgttgctgctgctagcttgagattgactaacttcagcacttggattgatctatatctatatgactatatagacgacacattgtgtacgtgtagataatatttcttcttttcctgaccgccataaaactgtttactctggccattttgaactaaaggctagctacaaatgagtgtccttctcggccttctacatgttctggtcatggacatcgagagatcaaacttctctgtcctgcttactagatacgtactagatttacttagcctagatagattccgttccaaactcgaggccaggcgcatcgagatccgagaacttcatccactcgtcgctcatcatgctgcatgcatgatggtctcaactctgaggcatgcaaacgcagtgagacgaactgggaggaatttatatagagtatatattgtccggcctgttggtgataaagatagaatgcatgcacgctaactgccaacatgcatgggtgctgcatcgaatttttggtatggtgcatgcataccgtgcattggtgctctgctagtactaggaccaatctccatggctccattagatctcttgtttactcgtctccatgtgcctctcaaagtgtgtactagctagttgcggcacacaagttggcagttgtttgttgtttcagcggggaagaaggaggtcaccgttgtcatcgtcaggggcgaagctaggatcagaagacagagggggcaggcttagcctccaagcgaccaaaccagtaagaacacaatataaaaatggcaagagaaccaaccataatatatatattgatatataatcttcattaaaaaacagtataatgaaacaacatctattttgtcaaacaaaataaaattaaatctcagttattttgaatttagctctacgtgtattagctagatcataggtgaaagtcgcctagagggggggtgaatagggcgaaactgaaatttacaaatataaacacaactacaagccgggttagcgttataagtataaacgagtccgcgagagagggagcaaaacaaatcgcaagcaaatgaagagtgtgacacgcggatttgttttaccgaggttcggtttttgcaaacc

SEQ ID NO: 520 - protein, 470 aa, Zea mays
MQLDLNVAEAPPPVEMEASDSGSSVLNASEAASAGGAPAPAEEGSSSTPAVLEFSILIRSDSDAAGADEDEDATPSPPPRHRHQHQQQLVTRELFPAGAGPPAPTPRHWAELGFFRADLQQQQAPGPRIVPHPHAAPPPAKKSRRGPRSRSSQYRGVTFYRRTGRWESHIWDCGKQVYLGGFDTAHAAARAYDRAAIKFRGVDADINFNLSDYEDDMKQMGSLSKEEFVHVLRRQSTGFSRGSSRYRGVTLHKCGRWEARMGQFLGKKYIYLGLFDSEVEAARAYDKAAIKCNGREAVTNFEPSTYHGELPTEVADVDLNLSISQPSPQRDKNSCLGLQLHHGPFEGSELKKTKIDDAPSELPGRPRQLSPLVAEHPPAWPAQPPHPFFVFTNHEMSASGDLHRRPAGAVPSWAWQVAAAAPPPAALPSSAAASSGFSNTATTAATTAPSASSLRYCPPPPPPSSHHHPR

SEQ ID NO: 521 - DNA, 4927 bp, Zea mays
tattttattttgtaccgtgtattgatatgaatcttagattttatgcaatattagttttttcgatataaatggtttttttgtctcccatagattttcctgctggctccgccactactcctcccgtagtcccgtgctaaccattaggtaaaatccggccaacttctgtgcttggttccacccgagagaaaggagccgggacaagctggcattcacagcttcatgcggctcccacccttgtcagagcacaaaatccggggatctggcccgtgaagctggtcgtgctcgtgggcacgctgtctggctgtggctgattgaaagctgagaagcagcttgtgaagtctggtctcgaatccgtgccattgccaaacgtcccgtgcaacagcagagacgtccggtttgtactccaaaatccactcttcgcttcgcctgcagtcggcaccgccgttcaagcaacggccaccgcacctcttgaaccatgaaccctaagtatccttatccacggtgagctctgaaatccacgtcgcctcacgtacagtactccccatagatttcagacggagctggaagaaaaagaaagcctagccaccgagacgtgcaacgggacacatccacgacacgaacgccgcgacgggactgggcaatgcaggtggtgtgggagtatttatcagcctcgccgtgtcttctttttatgttccagcacgtaatgtagggcgcgtagaatctagactatcaaatcgcgaggggcgagcgacgacgacggtgcggtgcagctttctacaggactagtcgttttcacgtcgtagcagagcacgctcgcttggagcagccgacaaacaccaagcgctagtagactaggactacagtgcagtgcgtctcgcaagtccacgggcctcgcattgcattgcaaaaaaaaaaaaaaaaaacagttgccgctatataacaggatccagcgcacggcaaggcggcaggcaacagcaacacggagtcaaggagcacgagttaggttggcaaccctcgagagtcgagagcatggatcccaacgacgccttctcggcggcgcacccgttccggtgggacctgggcccgccggcgcccgccgcgcccgcgcctccgcccccaccgccgcccgcgccgcagctgctgccccacgcgccgctgctgagcgcgccgagggagctggaggacctggtggccggctacggcgtgcgcccgtccacggtggcgcggatctcggagctcgggttcacggccagcacgctcctcggcatgacggagcgcgagctcgacgacatgatggccgcgctcgcggggctgttccgctgggacgtgctcctcggcgagcgcttcggcctccgcgccgcgctgcgggccgagcgcgggcgtgtcatgtccctcggcggccgcttccacaccgggagcacattggacgccgcgtcacaagaaggtatacacagcatggtcaaattgtttgcctctgtggtcgtgcactcgtgcatgcatgcggacagtgcccatgattcagtcatgttgagttgagttctgcttgccggcctgtgatgttatttgttcttgttcaatcatatcgcaactggcagtgctgtccgacgagcgcgacgccgcggccagcggcggcttggcggaaggcgaggccggcaggaggatggtgacggccggcaagaagaagggcaagaaaggggttggcgcgaggaagggcaagaaggcgaggaggaagaaggagctgaggccgttggacgtgctggacgacgagaacgacggagacgaggacggcggcggcggcgggtcagactcgacggagtcttccgctggcggctccggcggcggggagaggcagcgggagcaccccttcgtggtcacagagcccggcgaggtggccagggccaagaagaacgggcttgactacctcttccatctgtacgagcagtgccgcgtcttcctgctgcaggtgcagtcccttgctaagctgggcggccacaagtcccctaccaaggtacgcacacttattattaatttagcagggcaacgtttttatattacatatgtataaatccatttggtggtgcatacggatagctagattgaatgtacgataaacaaacaaaaactgtagtgttaaaaaacgtaatgtaatgaaacaaactttttaggtcgttgacaagctaggtactgtttataatttgctctaaaacatgtgttatatattctcagacacagttggagtcacacaagttaagggtcagaactctattaataatttaatacgaagacgtaattctcaactttgttagtagtgaaacggtttaagggttgactaaagttatatataaaaatactaacatttatgatgttaaataagcacattgttagaataataatgaagtatatctagttggtatataattaccaatactatttgctatagtaaatttgatcaaagttagtctagttcaactttcacaaatcctagaaatacagatactattcattgtaataacatcatagtcatagtaaaaaagatctagtggcatgcaaaaggcccttcacatcacctagaaggaagaaggaaatcctttgcagtggaattctattatattttgtgtaccgtaagtacgtctacagtagcacatgtgcaaaagatggtctatatagtacgccgtagtagtctgtagtcaagtacttctacgtacgtgtactcaagtatattttgctacagccgcacacgcacgtagatgacctggaaaaaggcgcgacgtgtcagtcatcggtaggctgccaaagcctgtgcagcttgtgttgtcttgtccggccggccccaggcctcagatacagataggcatgcatggacgccctctcctctcggagtccgtggcctgtgtgctgttgccaccggtttcgcgcgtaccagtacgagccatgtgagctcgcttttggcagtttggccggcgtacgagtagtcgcgactcgcgtgctcgcccgcagtgaaatgaatgcacggcctggcctgtccggattccagggctgattggatatgatgatagcttccctgacctggacggctgcatcgatgcgctgctcctgcgtccgcgccaggcgcacccgaccacaccggccagtttcacgacaccggaaccaatcgaccgtggctgatgaaccttttttttttttgcttgcactgcaggtgaccaaccaggtgttccggtacgccaagaagtgcggcgcgagctacatcaacaagcccaagatgcggcactacgtgcactgctacgcgctgcactgcctggacgaggaggcctccaacgcgctgcgccgggcgtacaaggcccgtggcgagaacgtcggtgcctggaggcaggcctgctacgcgccgctcgtcgagatcgccgcgcgccacggcttcgacatcgacgccgtcttctccgcgcacccgcgcctcaccatctggtacgtgcccaccaggttgcgccagctctgccaccaggcacgggggagccacgcccacgccgccgccggcctccccccgcccccgatgttctagctgcgtcgtcgatgtgtgcctgcaccggcgcggcgccgtacgtctcacatcgcagttcaggctgttccatggcgccatcgaaaagtggaaggcggccttcgtctgcctctcatgttgtcgctttgttcgttgcgttgtggttagtcagaagtgggcttagatttagaatggggacgtcacttgttcggccgagcgggccgggaaacaatttactgtttcgatgggccacttgttagtttgttacctcgcggccttactaagttgtattgtatccctcgtgatagttgtcccccatcctccaaaaaaaaaacccgacggtgtaccgctcctgtgatgatatatcctaagagtaaaatacattttcattacttcaacttatatgacgttatatgttaactcggtccataaacttttaaagtgtgtcagtctggtccttaattgttgttccggtcttagttaggtcgaaacgcgtcgtggttgacatatgaaccccacattttagcctatgtatctattttatctctctttcttggttctctctcaccgtacatgcggaaaagagagacaaaagagatacacatgctcacatgttgggggtccatatgtcaatcacaacctgtttggatctaactgagacccaaacaacaattaaatatcggattgacacactttaaaagtttgttaaccaggatgacatagggcgacaagtttcagaactgtaaatgtattttaccctatatcctaattatgctgtaacagtagcaccatttttttgctccttcgtattcgctctaattgttgaatggttgggaatgactaatatgtctctttgactttcttataaggttgtctctcttatacaccactcttagctcattcgtgattttctttggttcattctaatagtcaagttgtaggaaatgaaaactatctctttgaccctattctctcttttacgatcatccctctctccatgttctctcttttttcaacctttccttggtcaccttacctaatttgaaagctataaaacttccattggtgcaagactactgatgttaggttagtccgcatatgaatgttgcgacttatcccatgtacgtgtagctaatcttttatcgctcttaaccttacatcaatactctctcacaatacaactctttaaacagagatatgccaccaacggtactccgacaaggactacagagtgacaccactgtcacctccattcagattacacgattttgagtctgatggatctagcatagcccctccacctctaataacaagcactagagatgatcaactagcctcacttattgagcatatgatatagtagcaatagcttgccacaaagcagtagaggattgacaa

SEQ ID NO: 522 - protein, 394 aa, Zea mays
MDPNDAFSAAHPFRWDLGPPAPAAPAPPPPPPPAPQLLPHAPLLSAPRELEDLVAGYGVRPSTVARISELGFTASTLLGMTERELDDMMAALAGLFRWDVLLGERFGLRAALRAERGRVMSLGGRFHTGSTLDAASQEVLSDERDAAASGGLAEGEAGRRMVTAGKKKGKKGVGARKGKKARRKKELRPLDVLDDENDGDEDGGGGGSDSTESSAGGSGGGERQREHPFVVTEPGEVARAKKNGLDYLFHLYEQCRVFLLQVQSLAKLGGHKSPTKVTNQVFRYAKKCGASYINKPKMRHYVHCYALHCLDEEASNALRRAYKARGENVGAWRQACYAPLVEIAARHGFDIDAVFSAHPRLTIWYVPTRLRQLCHQARGSHAHAAAGLPPPPMF

SEQ ID NO: 523 - DNA, 6967 bp, Zea mays
gattgatatcattaatatatgaactaataattagaaaattaaaaatataatcagacatgatatatagaaccaacgtagtcatgtaccggcaatatgaataaattctcggactcatttacaacttttcatacagatatggagtttaaatggtaaaaataagaaaaaattatgcacaattgttggctctaaacccacgttcacatccacatagtcactagaacacatgtttttatgttttatactctatattcaagtatattatagagattttatagaaaaacaatgaaataataaaataaggctaagtcatgtcgtccttaggtcgaccaaaatcttgtcgggccaaatgccactcatcatacctgatttatttggacatatatactcgtacactagtgttgcactcgcgttatcagataacattaattgcatttaagtaaggtctatattaagtgtacagatactggcgcaacacacgagcacttagctagtaccaatttataccttagtttatataaattagattaatagttttttttaaaaacaaaaagtcaccttcttataactaaaatataaaaccttattcttagggtctgtttggttaggatattactgtagaaaaagctgctatgggctgtgagttgtggaaaaagctgttgtgagttgtgagctgttaaaaagctaaaaatcgtttagtggaaattattaaaaactattaaaaatttttcgatatatgttttcacagttttatcaaaaactattaaaaccatgtctagagtgttttcaatttttcactacgagaaaactagcttttagaaaaagttgctttctgaatccagctatttgatttagcttttgatttttagaggacaaaagtcaaaaccaagaaccaaactaaacacatcgttgagatcgtctcctggagaggctgccacggcggtgcgagggctcctcttctccaacgctcaacaaccccgcaccccgactccaatcccggcaccaaccctagctcccgaagaggcagaacacaaaatcaacggaccaccggaacaggaagcaacagcagcggggcgccggtgccgtacccttcactcattccgcccctgaaagtgaaacgtacccagatctacaagctactccactcgacttccataaataccactcctgcgattccaccttgcagttggaccggccgttgttgctttgcttcttcgcaaaaaaaaaacaaaaaaacaaaataggcctgtcttgctccgatcaggcgtgttcttaggcttcgctgcccctaccgcgtcttcgccgggatcggtccatggccggcgccgagcgcgcggaggcggtcgcgctggaacaagggctcctcgatccggaggttagttgagtctaccacttccactctccctccggttggcctttcctccatacttagataggttttttctacttgtattgaggggctttgtgtacttctgtttagatttagtggatgttttggtcagactggtagcctgttataggaaaaatcatgccttggcgcgcctgattaagaagaatacgagcccaactgcctgattgatttagtaagcatttcttaaagacagcttggcaccaccactacgtcgagattgcagtatttgttgttactttggctggacgacttgacacaattcttgggcaaaaactgctgtgcaatactatcgtcgtgcaatcaaaccatcaaaagttatgagaaattcttaacaaaaaaatatagatttacttcattatttactctatcaatatatcaaattttcaagttttaatttatcgtatattatgagttatatataaaagaaaattatatcaatataaaggattaagaaatgatagaattttctcttttttatatctcctaatgtagaatgaattagaacttgaaattttttatattggtagagtaaatagtgaagtatatctatattttttaaaaaaaattataacttttggtaatgtgattgcacagcgattgcatggcaagcttgattgcacaacagtttttgcctaaatattatgctttattttatatgtttggtcatggagtcatgagtagagtttgggataacaattggctattgcagtgttaatgtgaagctttactctctttttgttcactttatttcaaagagattgattggtatacttagctgagcttgagcctaaacaatttatctttttggtcctttcaactcttggccgtgtcaaaaatcaccctgtgttccagggcatttcttctttgttgttcctcagccgatgggcatattgctgtagttgcttccttttgcacattagtgttgaaagtaaagcctgtgcttgaagtgcttcaatgtattatggtttgcatacataatcaaatttctcttgtctgtttgtattcgtgctatttgtttaacaaagtattaacaaatcttggctgcaggaatccaaccaagtagtatacactggagatggatcagtcgacttttctggaaatcctgttgtcaaggaaagaacgggtagatggaaggcatgtccattcatattaggtattgtccagagtaaatttactaactgtgtgcttccaatttaatctccccataacctgcaattaactgttaagattaacctaggtaatgaatgctgtgaacgactggcctactatggcatctccacaaaccttgttacttacttgacaaaaaaactgcatgctggcaatgcctctgctgctagcagtgtgactacatggtcgggaacttgctacctaactccacttattggagcaatcctggctgatgcatactgggggaggtactggacaatcgcaacattttccacagtatacttcatcgtaagtcatctttgctcagaagtgtcatggtaacactcttggaaagggacatgcaagtaatttgtttcttttttgactgatgaataggccctcaattcttagtagactacgagcttttgtgtaattcatgtttagcccatacacatagtgcgacattcaactaatcctggaatttccctgttagtttgttattatttaacatgacatcatcttttcattttataggggatgacactgctgactctttcagcatcagttcctatgctcatgcctccatcttgtgaaggatccttttgcccagcagcaagcccttttcagtatactgtcttttttcttggtctttatctgattgccctgggtactggtggaattaagccgtgtgtctcatcctttggagcggatcaatttgatgatacagatccagctgagcgaatccagaagggctctttcttcaattggttttatttttcaataaacattggtgctctcatatcaagcagctttctggtttgggtgcaagacaatgtaggatggggactggggtttggcattccgactgtattcatggggctggcaatcataagcttcttctctggtacatcactttataggttccaaaaaccaggaggtagtccaattacacgagtatgtcaggtgattgttgcctctttgcgcaagtggaatgtgcctgtcccagaggatagctctctcttgtatgagctacctaatggggtatcaacaattgaggggagtcggcaaatagagcacacagatgaactcaggtatgccatcttatgagatgatagtaaaagcaactacaaactgagatagtttgtgaagctctgagataaacataatagtaacgaaagggcctctagctaagttggttaggtggtttgattaatgattagcactcctcgggtcctgagttcgactctctgtgggagcgatttttaggttgtggttaaaaaaaatcccctcgtatgtcccatgccaaagcacaggtccaagatccgacaccgattgcggttgttctcacatgggctatggtgcccttgtgtatgggtggggtaggggttcgagggttttctcgacctgcgcgagaaggccttcttcttaatataagatcgtgggggtagtcttacccccgcatgtcgagttttttttttataaagataatagtttgattgattgtgatacttcaaaaactgcgaataattattcttagtaaagtatagcagttgatgtcactatgacacttgtaagtaacaaagttctttgcataggaagtgtctatctgcccatgaacaagaactcgttcagaaataaaaaatgcgctaggcctgacaaatagctttcttttactttgtgcttgaatcagacattcaattagacacgcttaagtgttcagattcttccattaaatcagcacattatacctttgtgattgataagcttcccaattcagtattatttgtttttcaatgcatctgtcttgaattgtaaataagcaaagcagaaagttactcttggagaaaagcaacctcatgcagaaatagatttcatgtactgatggggatggcaaaatgattttgatgtcatctcttatttataatttgaagtctcttgatccacctagatgtatgagtctggtatggtatgctatttggtatatacttgcaagtttgcaacacatagtgcatgagagtcggtgctcacaacatatataattagtgcatggagtgtatagttttggaggaattatttaccattaggggttatgaattatttagaaataatatgtttatattatacctagcagagcaccatagtcaagaacaaaattttaattggttacttctgaaaatagttttttttctagttgttgtatatcagttcctgatttttgcttttctggaattatgtttatatactaaattgcaacttgtaagcacacatactagtgttttctctctgttatttcgactaatagataatatctataccttgtaattatcccgaagctaagagcctaacatatttgaaccgattttttattcagatgtttagataaggctgctacagttaccgaagttgatgtgaaaacggctgacttcaacaacccatggcggatatgcactgtcacccaggtggaagaactgaagatactagtaaggatgttccctgtctgggcaacaacaatagtgttttctgctgtatatgctcagatgtcaacaatgtttgtggaacaagggatggtgcttgacccatccttgggctctttcaagatccctccagcttcactatctactttcgacaccctaagtgtcatcatatgtgtcccgatgtatgattacatcgtggttccgatagccaggagattcactggcaacgagaggggctttacagagttgcagaggatgggtattggcctggtaatttccatcatggctatgtcagtcgccgcagtcctcgaaatcaagcggctagcagttgccagggaagcacacctggtggatcagaatgtcccggtcccactgagcatattctggcaaatccctcagtatttcctgattggtctagcggagattttcacattcattggggcgctcgagttcttctatgaccagtcaccagacgccatgaggagcctctgcagcgcgcttaatcttctcactactgcgtttgggaactatctcagcacgttcattttgacaatggttgcgtactttactacgaggggaggtaaccctgggtggattcctgacaacttgaacgaaggccatcttgattacttcttcttgctcatcgctggcatcagttttctgaacctgattgtttatgtcctctgtgctggcaaatacaagagcaagaaggcagcttgagttgtgaaggccaggggctggatggcgtgctgcgcgccatgttatggtggacacttcagttcaaaatctgtatatatgtttcccgcattaaccaccctagctgaagcaaccatctgcaattgttgcaaagtttatattcttcattgtgctggactaagttgattatacattcgtgcttctactttgtgtatgtatatatctgacctaaagttgctgaacatagacaatttcacttgcctctggtatccagggttttgattgttttttaacctagatatgtgaggtcacgttttaacttttgtatgtagagtaagcatcaatgtgctggttgaacaccaggagggcttggggcgtacttatggtgttttttgttggacgtgaatggaaggggtggacgggtggtcacatttttagtgtttggatgagaattacgtgggggcgagataaacaccggagcaatttttagtgttggtatgatcttaaaaaatcgaggatggtatcgcttcccgtctcatcctactttaatctcaaaccaaacatattcttacttttccgtatatattacatggtagcccgttctgacattctctgatggcacgtcgtgagttgagagttgactggttttggtttggttaaattggttgtctatcagaacgcgtaattggctgccgccttgtttgttatggtttcactacggaaagatgtttactggaagctgacggaacgtgcaggctaattggcagtagtaatacatgagcgaatgtaggttcgttccagccttccaggacagtcaactctcagcacgttgatccctgttgccctcatgcctgctacatcagcaaccggaccgcaatgagatcctctgcaccctgcagttggggtcgctgatgtagggtccaacttaggtatgaccccatgcgtcagtgacgctgcctgggtatgatcccatacgtcattgactcaactgcagggatctgtttcacaaccggaccaagtctcccgaagaatgataggctcggctgttgtcgtgtcctagactatgcacaacggttacacttaaacactctcctaaagctttgggctcgttcggtaaggcctagtttgggtactctaataatgaatgagattggagtggattgagatgtattgagagagtatttgatctattggggatttacaccctctctaatcccttcaaaacactctaatcccaaagtat

SEQ ID NO: 524 - protein, 587 aa, Zea mays
MAGAERAEAVALEQGLLDPEESNQVVYTGDGSVDFSGNPVVKERTGRWKACPFILGNECCERLAYYGISTNLVTYLTKKLHAGNASAASSVTTWSGTCYLTPLIGAILADAYWGRYWTIATFSTVYFIGMTLLTLSASVPMLMPPSCEGSFCPAASPFQYTVFFLGLYLIALGTGGIKPCVSSFGADQFDDTDPAERIQKGSFFNWFYFSINIGALISSSFLVWVQDNVGWGLGFGIPTVFMGLAIISFFSGTSLYRFQKPGGSPITRVCQVIVASLRKWNVPVPEDSSLLYELPNGVSTIEGSRQIEHTDELRCLDKAATVTEVDVKTADFNNPWRICTVTQVEELKILVRMFPVWATTIVFSAVYAQMSTMFVEQGMVLDPSLGSFKIPPASLSTFDTLSVIICVPMYDYIVVPIARRFTGNERGFTELQRMGIGLVISIMAMSVAAVLEIKRLAVAREAHLVDQNVPVPLSIFWQIPQYFLIGLAEIFTFIGALEFFYDQSPDAMRSLCSALNLLTTAFGNYLSTFILTMVAYFTTRGGNPGWIPDNLNEGHLDYFFLLIAGISFLNLIVYVLCAGKYKSKKAA

SEQ ID NO: 525 - DNA, 6481 bp, Zea mays
atctactgctcattcaagaatatatgtggttttataaagatggaccaattaaaggtgcactcaatctatgtcatctatggtgaaaaggtgaaacttctatatatattaacaaccaattttgctacatgatacgatatctgtaataataattttatacttaattatgcaccgctatatttttaaattatatctttatctaaaaccgaaagcttttccgtgattaatggtaaccggtatagaaggttgcttaaaaggaaccacaacacttggcatggcagtagtaaatataggcactataccattgtctggccacaaaggtactttagcacactccgcatatctttcgtacaatgtgttgatacatatggtggatatctagaggacattgcttgttgttacatcacaacttcaacaattatagtcattcatgcatcagaaatcactggcattccttcaccacaatttgtttggcccaagtaacttattaatagcttttggtatcccccctctctaaaatcactaatgataacatacacatagcttgatttactcatgaaactatagcataaagtaatctatctagtgcccattgaagaatatacgtggttctatggagatgaaccgatgaaacgcgcactcaagctatgttatcttcggtgcgaaggcacaacttctatattgacatccaattttgctatctgatatggtatctctaataatatttttatacgtaaatatccgccgttaaatctgcaccgctatgtttttataattatatttatttgaaaccgaaagcttttccgtgattaatggtaaccggctaaaaagattacttataagaaagcttaagatctttaacatgaatgaatgccatacatcaaggatactatgccatcctatatatgtccacaaatatactctagcatgacggtaatataatgggatatatataccctcataaatcatggatactatttgtaaggactttggtatttgtacagtcattcatgcatcagaaactactaaaaagcaaaatgaaaagttaatctatgtagattttgcattgcattcccctcaaccaagcaagcatccagaggaacgaaggacaaatgttattcaattttgtattgctttcccctcaaccaagcaagcagcccaaagaacaacaaatggcattcccatgagagaaaaaaaaaatacttgtaggtggggccaccctcccctacctatatatacccctgttcacgccgttcccaagaccacaccaccagtccatccatcctgcgctgcgctgcgctcgtgacaagcatcgcaagcagctcctcctcctccccctgtagccaacaccttcctgttccgggcgcagtagcggctgtcggccctcgatctgacgagccatgacgaagcacgccgcctactccagcgaggacgtggtcgcggccgtggcggcgccggcgccggccggccggcatttcacgtcgttccaggcgctgaagggcgcgcccctcgactgcaagaagcacgccgccgtggacctgtccgcgtccggggcggccgtcgtgggcggcggcccctggtttgagtccatgaaggcttcgtcgccgcggcgcgccgccgacgccgagcacggcgactggatggtatgtactgtactgtactcccggccgcgcgtcttctctctctctttctctctatctgtctgcacctgcacgcgacgagatcgatcggcccgcgcctcactttccgtctgcaggagaagcacccgtccgcattggcccagttcgagccgctgcttgccgccgccaaggggaagcagatcgtgatgttcctggactacgacggcaccctgtcaccgatcgtcgaggaccccgaccgcgccgtcatgtcggaggaggtcagcgagcaaccttcgccccccgggccgttttctcacttcttcccgatgcaaaagattccatttttcttttctgttctattttagttaaaaataaattaacggacgataaatattcggagttataacaatataaaagaaatgaaaagaaaaaaaagttgctcttttcctactatggcagtagcagagcatgctctgttcgttttcgttttcgttccctggaactgtcggtccctgtgtttaccttaacctgctgctgtaattaatatatatagtaaccgaatgacggaccccccccccccccccctctgtgatttgatttcctctgtggcctcgctcagatgagagaagccgtgcggcgcgtcgccgagcacttccccaccgcgattgtgagcggaagatgcagggacaaggtacattattccgattcggatcccgtcaactcctctccgttccgttctttcttttcgctgcttcaaattattactgtgtccatctctgtatgttgaagaagaatgtgtggtgtggactcggccttggcgccttgtagttgcacgctgtatagcccgcgcttccttgcacacacacgacacgagctagaaaaggaatcttccaggtttcctttttctacccggcgagttttaaaatctcacctcactcactcacgcgtccgtaagaccgtgacggcgtctggctgtgcgatcggaccggacggagccacggaggaggaggaggaggaggaggaggaggaggaggaggaggagggagggagctgatgagaagcgcgggcgtctgcttttgttttgtttctcatctaggcttcgctcgctcgcctccttgcaccttttctcctgccgttctttctttttttctctttattatttgtctgcacccgctgcggctaccttttcttccttcttctgcgagtccgcacgcctttagttttgtttgctagtagctagtagtagcactctgggaaagcggcagtagtagtacgtaacgtacctgggggaagtggagtggtgtatttatggccatggccttggtgcaatttataggtgctcaacttcgtgaagctgacggagctgtactacgccgggagccatggcatggacatccagggccccgccgcctgcaggcagcccaaccacgtccagcaggcaaatgtttccctctcacatgcatgatgcattgtcgatcgtaacccccttgactgactgaccttcaggtcgtacacacgcaggctgaagccgcagctgtccattaccaagctgcgagtgagttcctgccggtcatcgaagaggtaactaaactccatgcaactatatacgcaagcatctatatatatatccgtcgtcgatcgtccgtcttcatcagatcgtttatatattgccatgcaggtgttccgcacgctgacggccaagatggagtccatcgccggcgccagggtggagcacaacaagtactgcctgtccgtccacttccgctgcgtccgggaggaggtatatatatgtatagatcaattatattattctgtgccggccgggcctgttgatttctttttagttattattcatacacacgttggattcacctcggcaggaatggaatgccgtgaacgaggaggtcaggtcggtgctcagggagtacccgaacctcaagctcactcacggcagaaaggtgaggaggcatcgtacgtacgtatcgatcacatcagatgatatatatggatcggaataatattagtattatgctcagtcctgctgtatattagttccccgcctcccgatcgatcgatcgatcgatccagcagaatatcattgagcaactagtagtaccagtagtttattatactcactccgttcttttttatttattgcgttttagttcaaaaatgaacgacaaatattcgagaacggctcatatcttcgcaaaacaaaactttctttcagacaaaacatgacggtgcatgcagtagtgtgagcacgtacttaatttatttatgttttataatggaataagaaattgtatatactatatatatactagtaaaattagctaggttgcctattatcagcagtgagctagctagcaagacaaattaaagcagcaggtcggtggtggtggcggtggcgaccttgtcgtgttctcgctcgtcgtgctggtagctctagagagtacgacgtgcatgcatgcacaagcacaggggcgcagtgatagatggtgataatgcatgctcacgcacactagtgccttcttctcatatgcatatatgcaggtgctggagattcgtccgtccatcaagtgggacaagggcaaggccctcgagttcttgctcaagtctcttggtagatctctctctctctctctatctgcaaaccaaataaactatatgcgcacacacatatatggtgcacatgtatatatactagtattcttaaccatttgaacttttgttttttcaggctatgctgggcgcaacgacgtcttcccgatttacatcggagatgatcgcactgacgaggacgctttcaaggtaaaaaataaaaaaagaagctagcagaaaggtagatagtaggaaattaacttcgtgttggaaaatgaaaagagagaagctataggtgagctaataaactctcttgtcgccatgctgtaggtgctccgcaacatggggcagggcatcggaatcctggtgtccaagcttcctaaggagacggcggcatcctactcgctgagtgaccctgccgaggtaagaatctccacgtccgaaaacgataccggccggccgtctgtgtttgtctataggggatcggaacctcatcacttgtgacggtgactactgccaactagctaagctagaaagctagaccagtcacatctagacaatctttttcgttacccatgcatatgctttatttgttgttgggtaattgatgggtttgataatgattaactctcgcgagaccaaagctagctggttgttgacgtgcttgtggattaattattaaccgatcgtttttacgtacgtgtggtgttttatcatgacgtgtgtgtaggtcaaggagttcctccgcaagctggccaataagaagggggcgcgccaaccatgaaaatgaagacgacctcgtgcatgcatgtagctaagctaggcatggcgtggacgatggatggatggacgagcacaacagcaaagaggcgcttattagctacaactactggccttttttgttgttttctttttgctcctacctatgcatagatagtagtctctactctctactctctacctagcaacaacaacaacctagctgatgcgcgcatgcatgcatgcattggtcgtcgcttactacatgcatggccattcagtgcagtgcgtgtgtgcgatggcggagaaacaacctagctagctagctgctcgatcgatcgatcggccttgtcttggaagaaggcggcagggagggggtccctgtgtaactgctggggatccgatatatcgatctgtccttccggccggcaagatcttgtaattagccgctgtggtactagctagcagctagagagaaatggataacaaaacaaataacatgcgtcgtcgtcttcgtctccgttcattctcgtccctctggatcctagagcctgtatgtacatgcgtggtcagacgacggtcgatctgttggcaacgcgcgcagcagtctagctagctagtctgtgtgtgtgtgtgtgtaggtggtgggcacgcctgcctatgcacagatgacacgacgtacgtacacgtacacgtactgatgctgctggatcgatatcgcaattactttggttggtgcggcaaacctgaaaaccagcagtggggaggtggtggaaggaaaggaaccgaaagaacacgatgcacagtgcgtgcgcagtttggagtggaccagctctagccaggtggtagcggctgcttgcattgcttgttgtaaatgcagcatgcacctgtgtgtcagaagcatgcatgcgggagtcgtcggagtgagtcagcaggccggtcgatcggtcgccctgccggcacgagcgaggtagcctagccctgcgctgaatcatatctccagatagatagatagatagatagatagacagattgtattcaatgtagagtttgcaatgggtagctctgtggccggctacctatctatctatctatctatctaccagctgaagatatatagtatgattcagcacaatataatagcaacgacatacaccacgagagagagcgacaaaagtatttatcgtcagaaggcaggagaaaaaatatatttatctatcggatgatcaattaattgatcgtcatgaatagcgtggagccaaaagagatgtgggatatgctgcctgggagctagctaagcatgcatgcggtatgtaggggtacaagtccttggccagtagccgtgccacctttgccgcaggcaggcaggcaggcaggcgcagcgtcgggtcgggtcgggtactgtgggtgaaaacggcaaggatccatgcacatggccccctgcgcatgcgccggggacgccaacggtggcgcgcaggccggccgcggccgggcatgattga

SEQ ID NO: 526 - protein, 361 aa, Zea mays
MTKHAAYSSEDVVAAVAAPAPAGRHFTSFQALKGAPLDCKKHAAVDLSASGAAVVGGGPWFESMKASSPRRAADAEHGDWMEKHPSALAQFEPLLAAAKGKQIVMFLDYDGTLSPIVEDPDRAVMSEEMREAVRRVAEHFPTAIVSGRCRDKVLNFVKLTELYYAGSHGMDIQGPAACRQPNHVQQAEAAAVHYQAASEFLPVIEEVFRTLTAKMESIAGARVEHNKYCLSVHFRCVREEEWNAVNEEVRSVLREYPNLKLTHGRKVLEIRPSIKWDKGKALEFLLKSLGYAGRNDVFPIYIGDDRTDEDAFKVLRNMGQGIGILVSKLPKETAASYSLSDPAEVKEFLRKLANKKGARQP

SEQ ID NO: 527 - DNA, 4843 bp, Zea mays
ctttgagggcttgttcggttatttccaatccatatggattggaggggattgatacggattggagggtattttgacttactagggattgaaaccccttcagggcttgttcggttattttcaatccatatggattggagtggattgggagggattttgacttacaagggattaaaaccccctcaatccccctcaatccatatggattggggtagaaccgaacaagccctcgatccccctcaatccatatggattggggtaaaaccgaacaagccctgaagccgcgacagacccacagttaccatgtgtgcaaagtgtatagacactgcgctgatgtagctagcgtgtgtgacactgcgtgagcccataatcaataatcatacaggcagagaacatctgtagggctaaccctaattaagaatacaatctacttaatccccctcgtagctagggtatatatacaaataattaacgggtatggcagtgcatgcatgcatgccgatgacttgcactggtaccagttcgtcactaatgattgccaattatactgcggcccttttaattatgagatggaagcagcaggaggcaagctagttcaattgtccggtttgttaagccgcattgctcaagagcacccctgcctgcgccatcgatcgccacacggtgtgtgccagtctacatcgccggcctctttatcattgtgctagtagctgcttattaggcaaagctcaattacgcagctaagccagttgatatgcataaaagggaatgattactcttaaaccggacgcactggcgctttctgcttttttttaaaggaatgctatgaaaattggtacgtacgtagtactactactatgcatatcagtttttttcttcttcttttttttcttatacatatatcagtataccagtctgtatatatgtacacacacttcgttcttcagctacgacgtacaatactgctacaccccatgggctgcgggaactgttcgtgaaaagtgacgagatgaggcagcactgtggtagatattcttgcgagtagtggcaatgtcaccctcacacttttccttgtactgccattaatcccaatttgtccttatttatctgtttaccctctctttctctctcctcggccgggcccttttttttctttgcaacatacaccaccacaatattcttcaacactctcacctcctctcattcaatactgtctctcagcctttttttttcatagtgtgtgcggccgatctatgcacctcacctttcccttgctgcagttggaggaagtgtgctgcaggtggaagaagagaggggagaagctggttcccctctccatatctctcctccccagctccctccccctctcatagatcgatcacacagcctgcaggcacagacaagagttaggctgttctacctgatcatatgaccctccagcaattctctcatccacacacaaactgaagcaagaattattgcttatctatatcctgtctgtcctttcctctatttcccccctcccctttctatttccattgtgcagcttgttattagtagatagcagtggatcgatgtgtgatggaggaaacaagctagctagctagctaccagctgaagcagcagggagaagaaggatagagagagagagagagagagaaaacatcttcttcatccatagtctcggcctttcttcaccaggtcgtctgcagatctgtctcctgtgaccttccagaggtgaggatgagcaggtctctctagctcactgcgctacatgcccatgtatgagaagttctattttagaagacaaaaaggctttgatctgcagtcttcgttctcgtcttctgggttctggccttctcttgcttggcagtggcactattattatattatctatggttcttgagatttgagcaaataaagatcgcctttttttcctttaaaaaatctgtgcttcttgtgccgtatcatcatacatgcacacccacgcatttgtacagtggatcatgcatcctccatttgtgttcatgatcatgctgttgatttgcactgctccctttatcaataattttccgcagatgagaaatctacagtctcattattgtcccctctttctttgtcccaaggtaaaaagggaagaacagaacttccccatttttcccaaagattgcacatgcatagctggctggatcagagcacatcacactccgaaaccctaatcttctccctctcctcgtgcctttcccagaacaatatataatcctccgtccaagaaaaccctagccctaagattagtatcgaaagatcgcgatgcatattattcacagctcagccaccacaccaccatatgtagagatagatatacgtatatttctttgggaaaaaacggataataatccaactaattaatcaacgtttttctactgatttattcgcaggccaagctaggccaggaaggaaaaatggcgtccccgtcgagcaccagcaacaactcggccttctcccctgtggcggcgtcggccgggacgacgatgcctggtgccggggcgccgtgcgcggcgtgcaagttcctgcggcgcaagtgcctgccggggtgcgtgttcgcgccctacttcccgccggaggagccgcagaagttcgccaacgtgcacaaggtgttcggcgccagcaacgtgaccaagctgctgaacgagctgctgccgcaccagcgggaggacgccgtgagctcgctcgcctacgaggccgaggcgcgcgtcaaggaccccgtctacggctgcgtcggcgccatctccgtgctgcagcgccaggtccaccgcctccagaaggagctggacgccgcgcacgccgagctcctccgctacgcctgcggcgacgtcgccgccggcatccccaccgcgctccccgtcgtcagcgccgcccccaggctctccacggcgccaatgacgacgacgagccccggccagttcgccgccggcatgtacggcagcggcaggaggcttggggtcgtcgacggactagcagcgccaccgctgcctccgtcgggcggcggcggcggctgctacttcatgcggaaccaccacaacaacgtcgtcattagtagctccccaggcgctgacgtggcgcccgtcctgccttacgcttccgtggctaattgggcggtgaatgccatcagcgcgtcgacgaccaccacctccggatcagagagcattgggttggatcacaaggaagggggagacagcagcatgtgaagtgaaggggaagcgctgcgctgccgtgaatggtaaggcgctgtttctttctctctgagtaattaagtttaatcctgcacggcggccatgcccatgcatgatgtatagctactgtatgtgctagctagtttgtgtgttttaattatatacatatatagctgttcttatctgtgtgtgcgttgctttgcttattactatgcttgtgtagtgtgttgtgcagtgatgtattactctaatccttgttaagatgtggaggcgacgacatggatttgagccctttgaccttaatgagctgtgggatcggacggcggagtcggtgaaggaaggaaggaaggaagcttcaggggggggggggagacgatgtcatgggagcccaatcgatctcagcaggttgattaagagctaaggagcaatctatctatctatctatctacctacctttcgctatatatatctatatagccgacatgaattatatatatcgactgcatctatcccctttctgcatgttgtgcaaaccaatactttggagtactaaatgtaatcgagccgagatcttgatctctcttcttttcatgattaattcttcgttctcgcaggatccatccatccatcatcatcatcatcatcagtcattagcacactatgcatgcatgcatgctttggcctttgcgatcagaaaacaaaacagccacctttaggccttgataaataaaatacacaagagccaatcaaaggcagcaggttcctacatgcatgcatgagtagtagtgtagtactaagctgatctcttgggccaattaaagggctgcatgcatgatctgcatcttatatcatatgtcataggcaccagtggcctatgctcttgcatatatgctccagatatatgcatgatcgtcagatgggagatcgagctagctagctagggacgagaggggagagattaataacgacgagcacacagttattagttgtttaaactatattatatatacataaatactatacggtgatcaagcgagcatcacatcatttctttcgcagccagacattcttcccgtccatgttagtaaactgtaaaggcatggggggaaaagcagtattccgggcactattcttataggccccagatctttttatggatctcactgtttggtgcattgtacatgtatttattccatctctcgcgcgcgcctagaattttcctcccattggcattgagcccccttttttttctctaaatcctgcggctctgaattgttgcactggccgctgctttaacctgcatgcttaaatgttccatctgctgcacaagatctaagatgttcattgctgtgtactgttgggttccttagcttgtggatctcatcgagttttgcacttcctttttagttctgcccgtagtatatattgaagtgtgtgtacccttcttgcattgatgccactgttggtccccgtttaacctaaccatacctagttcgattccatgcattgctcgagtgagttttctatatataccaacagctgcatgatgatatagttactatcttgccacaagtagggccaccagtcatacgtacacattcacccttctaagt

SEQ ID NO: 528 - protein, 261 aa, Zea mays
MASPSSTSNNSAFSPVAASAGTTMPGAGAPCAACKFLRRKCLPGCVFAPYFPPEEPQKFANVHKVFGASNVTKLLNELLPHQREDAVSSLAYEAEARVKDPVYGCVGAISVLQRQVHRLQKELDAAHAELLRYACGDVAAGIPTALPVVSAAPRLSTAPMTTTSPGQFAAGMYGSGRRLGVVDGLAAPPLPPSGGGGGCYFMRNHHNNVVISSSPGADVAPVLPYASVANWAVNAISASTTTTSGSESIGLDHKEGGDSSM

SEQ ID NO: 529 - DNA, 3984 bp, Zea mays
catggtgtgaatgatcatgagcctaaatttaattcatctcctactaaaaatggtaatattaaagaacaaccaaattttattgagtgtttatattgatatgaatgttttaaatgtttcttaagtacttatattaatatttttatatattaaaaaataattgtatgggtttctatttaagccttgtcctgtgcctctaagatctcacggccgccactggtagtggatagctagaagcagcaatttgtgaacactgaaattttgtgtatgtatatatcatatatgaacggccctgatatataaaatgaaattctacgtgtacgtacacatacattcggtacggtagatagtctccagatacgcggaataatgattgagaaacgtgaaaaaggatgaacaacaagcatggggttagcttaggcatgcaacttcctatctagctgtgcctgtgcctgtgccgctgtgcgtgtgatcaaacgtcgcaactagcgcaacagcatcttctcacctcactcatttaaacatgctcgtccgtcgcaatcacggatcgatagctgtttcgtaccaagatcgtaagagataccgttgcgttgcgctgtagatcctccggccgcgccgcgtccctttcctccctccctcccttccctcccgtcaccaaccacggttgcttcaggggcggagcgatgatctgcatcattcattcatccggcccgagagcagagcgcacaccacaccacctccgtgaggtggagcggagccatcacctccgtcacgcacgcgatttcttttcaaaccgagtagctcgatcgagtcctcgttacgcaactcgaccaaccggcgtcggccagctgatcgagccgcccggccggccgcgcctggtgtgacgtgccatctcgatctcgatggggcatcttgctcctcctcgctctcttcttcttaatttgccgctgcgtgcggccttttattcgccctgcctctagctgctgcttcttccaggatcggggatcggagcttgtgctgctactgctactataccagcgctagctagcagcagccgccggccggctcgcgcaagctaaggaagggtcgacatgacgatggggctccgcgtccgcgactcctccgcgctgctggctctggccgtcgcgctcgcctgctgctccgttgcaggttcggttaccatatttcattcatctgaaaatgtaaacagtgtcgatcggtcgatgggcgacgctcacattctctcctctcctgtcgccatggctggcggctgctgcacacacactggcacttgcgcagtggtggcctacgaccccctggacccgaacggcaacatcaccatcaagtgggacgtgatctcgtggacgcccgacgggtacgtggcgatggtgacgatgagcaactaccagatgtaccggcacatcatggcgcccgggtggacgttggggtggtcgtgggccaagaaggaggtgatctggtccatcgtgggggcgcaggccacggagcagggggactgctccaagttcaagggcggcatcccgcactgctgcaagcgcaccccggccgtggtggacctcctcccgggggtgccctacaaccagcagatcgccaactgctgcaaggccggcgtggtgtcggcgtacgggcaggacccggcggggtccgtctccgcgttccaggtctccgtcggcctggccggtaccaccaacaagacggtgaagctgcccaggaacttcacgctcatggggcccgggctgggctacacctgcgggcccgccgccgtggtgccgtccaccgtgtactggacgcccgaccaccggcgccggacgcaggcgctcatgacgtggacggtgacctgcacctactcgcagcagctggcgtcccggtacccgtcctgctgcgtctccttctcctccttctacaacagcaccatcgtgccgtgcgcccggtgcgcgtgcggctgcggcggccacggcggccacgcgggtccgggcggctgcatcgagggggactccaagcgcgcgctgtcggccggggtgaacacgccgcgcaaggacggccaggcgctgctgcagtgcacgccgcacatgtgccccatccgggtgcactggcacgtcaagctcaactacaaggactactggcgcgccaagatcgccatcaccaactacaactacaggatgaactacacgcagtggacgctggtggcgcagcaccccaacctggacaacgtcaccgaggtcttcagcttccagtacaagccgctgcaaccatacgggagcatcagtgagtataatcatcgtcatctgatgacatgacatgacatgtacataatcatcggtgtctcaaatatatatatgcaattaatgcagatgacactggcatgttctacgggctcaagttctacaacgactttctcatggaggccggcccgttcggcaacgtgcagtcggaggtgctcatgcgcaaggacgcaaggaccttcaccttcagcatgggctgggcgttcccgcgcaagatctacttcaacggcgacgagtgcaagatgccgccgccggactcctacccctacctgcccaacgccgcgcccgtcgtcgcctcgcagctggtcctgtccgccgccgcctcggcgttcctactgttgctgctcctggtggcatgaccgtgaccgaaccaagggcaaggcctccgttttgttttcccgtctcgtcccgtgggcagggagcagacttcagtaggcagggcattttatttggtttttttgccaaggattcaacacttgggttttcgtcagaggaaaactgtcgtgtatgtagtgtgagttgcaggtcgtcggatccccacgtacaagacaatctttggatctagaatatgcaaaacgtgaatcagcacgccaggatcatcgtctcctacaagattggcagaaaaaaaatctcatgatgagtgatgtgtcaacagacctatatatatgtgataatcactggtttcaacggttgcctgaacatttgctaacccatcagtagccactactacatacgaagccgcaagaacagcgatgccgtccaaatagcgatgggcagaacgaaggatgagccattcgctcattcagtacaggggaagagtttaatagccatgagtacgcatctggtggagtcataactagatctcagcatgagccgtctgacttaacccgatttgacctactaaaaaaccctaacccaaccctactaatacaacgtgtgggatgagctatggtttttgacccataataatccacggactcgacgtaggcattttttactcaaagcacgacctaaccgaaaaaatccgacccaacataaaaaatccgatccgacacatccaacacggagacacaggccaacccgaccagacattagacatgagtcgtgtcgaacaacccaggatctaaccttgatccaaccagaatctggcccaactcaatgtttaaacaggtctaggcataaaactgctgccaccatgagtatatacaaccattctagaacacgaacgttggcgggaccttccggaacataagcgcaaatttcacattttccatctagcacatccagcatgagcaggtatgttggcacatttttggccaaacaccaactatccttagctcatgttcacggggaacgagaccttgagaatctctctgcgggagcgcggaccgtctctagtaggtcattggaccgcgactctgcgtagggagctccgctcttctatgtgggtgcgcggaccgtccgcgtggagatgatggaccatccgcaagggcacatagggcttcgtgaatctcctgcggaacctggatcttgcctttcgggagggatctcgtcggggaggaaagatcctagtgttgtcttggggacagtagaccaaccaagacgtctctagacgacgtcgagccaaaatgaggtgaagattgaggttggaaaactacaaccaaggctaaattactcctactcctag

SEQ ID NO: 530 - protein, 450 aa, Zea mays
MTMGLRVRDSSALLALAVALACCSVAVVAYDPLDPNGNITIKWDVISWTPDGYVAMVTMSNYQMYRHIMAPGWTLGWSWAKKEVIWSIVGAQATEQGDCSKFKGGIPHCCKRTPAVVDLLPGVPYNQQIANCCKAGVVSAYGQDPAGSVSAFQVSVGLAGTTNKTVKLPRNFTLMGPGLGYTCGPAAVVPSTVYWTPDHRRRTQALMTWTVTCTYSQQLASRYPSCCVSFSSFYNSTIVPCARCACGCGGHGGHAGPGGCIEGDSKRALSAGVNTPRKDGQALLQCTPHMCPIRVHWHVKLNYKDYWRAKIAITNYNYRMNYTQWTLVAQHPNLDNVTEVFSFQYKPLQPYGSINDTGMFYGLKFYNDFLMEAGPFGNVQSEVLMRKDARTFTFSMGWAFPRKIYFNGDECKMPPPDSYPYLPNAAPVVASQLVLSAAASAFLLLLLLVA

SEQ ID NO: 531 - DNA, 4295 bp, Zea mays
ggacaataatgtttcagttatcgagcacatgtgaaagtaaaatggttagctcgactcaagaaccgttagtggaaacaccttttacactaacggtttccttaaaaccccgatagtgcaaatcaagcattttcactgctgactttcttaagaaatcatatttgtaccggcagggccttaataaaggtcccgcaacttcggaagagacgggtgggtggggcgctcccatgattaaaatctgttttgctatttattttaaaacatggtttatatttccaaaaaaaattgtattgggggttttcttaacttaggcgccaataaaatttgatttccacggcagctgccaccgtcgtcatcgctgaccaacccggctggtcgcctctctgctccatccatgcacgttaccactatgcagatgcagccgaaacaaacactggctagaaaggcagcccaacgggcctactgtcattcgctccggcatcctactggtggtcccagttgcaccggccgatgaccagttcatcatttttctcgacgaatttgtgcacagaatttactaaaaattcttcgcacgtggcaaaaccggggaaaaatcgacaactagtcggggttttttttctgatagaatagtccctgctattcatccatgaaaaccaaacacgtacactacgtcaccgtcatggatggagccagtgaactgatgattttttccccaccccgcacgcaacagcatgggtgacaacaaccactcccgctgcggttgggcgagcacatctctacgcacttgacactcacgcaaacctaacgcatactagattaatcatcgccaccaactatcggcgacagaaacgatgggccccgcttctcttaatcacggtgcttgaattagtgcgcgcatagtagtgaaaaataatagtgaaaaataagcagtgcgtgttttggtgtggtggttggtgagccgtccggcccaataaaaacccctcgcaccacctcgtccctcttcgtcgcatcgcacgccatcagcagctagcgcgctcctcgagcccagcagagaaaggccggcctacccactctctctctctctctctccagtctccaccggcagcgctaatcgtaatagccatgggctccaccgccggcgacgtggccgcggtggtggacgaggaggcgtgcatgtacgcgatgcagctggcgtcgtcgtccatcctgcccatgacgctgaagaacgccatcgagctgggcctgctggaggtgctgcagaaggaggccggcggcggcaaggcggcgctggcgcccgaggaggtggtggcgcggatgcccgcggcgcccggcgaccccgccgccgcggcggccatggtggaccgcatgctccgcctgctcgcctcctacgacgtcgtccggtgccagatggaggaccgggacggccggtacgagcgccgctactccgccgcgcccgtctgcaagtggctcacccccaacgaggacggcgtgtccatggccgccctcgcgctcatgaaccaggacaaggtcctcatggagagctggtgagtagtagccgcatcgcatcaaccaccttctacctatctatatccatcacttgttgctgctggcgtgcgcggcatgcatgatgacgagctcgctcatcattggtgctactagtgatttatttcgtccagtaaaattaattaaggtgcgctgctactctactggctgcggctagcacaaggctggaaatagttgttacttgttatacacgatataatatttctctagaacaaaaaagattttttttttataaaaagcaagcaagaaagaaagtgagtgacttcatgtttttcctaaaaaaaagttaggagtgggatggaaaagtcagcaaggaccacttgtttgttgtccactatccatccagtgggtgagacttttttgcgagacggagcactatattattggccgagtcctttttctgtatccgcaaaacggcagccgtcgatcgccggacggatcgacggctcacatgagtgtcgagtccaattccaaccacgagggcggcaaggaaaaccatccgtgctggtctggactttttgccaaactccattcagccattcgccgactgaaggtgaatcttcagacagccagattgtttggtgtctagtgtgtgcgaagatggcgtagaaaagactgagagacagttggctcacacagacaagtgacaactgactatagtatctgcctgcctggctgatgctgatagagatggggactcttgtcctgtctgtttcttgtatgcgctgatctgattctgatcactgccactctgccaggtactatctcaaggacgcggtgctggacggcggcatcccgttcaacaaggcgtacgggatgacggcgttcgagtaccacggcacggactcgcgcttcaaccgcgtgttcaacgagggcatgaagaaccactcggtgatcatcaccaagaagctgctggacttctacacgggcttcgagggcgtgtcgacgctggtggacgtgggcggcggcgtgggcgccacgctgcacgccatcacgtcccgccacccgcacatctccggggtcaacttcgacctgccgcacgtcatctccgaggcgccgccgttccccggcgtgcgccacgtgggcggggacatgttcgcgtccgtgcccgccggcgacgccatcctcatgaagtggatcctccacgactggagcgacgcgcactgcgccacgctgctcaagaactgctacgacgcgctgccggaaaatggcaaggtcatcgtcgtcgagtgcgtgctgccggtcaacacggaggccacccccaaggcgcagggcgtcttccacgtcgacatgatcatgctcgcgcacaaccccggcggcaaggagcggtacgagcgcgagttccgcgagctcgcaaagggcgccggcttctccgggttcaaggccacctacatctacgccaacgcctgggccatcgagttcatcaagtgaaccaccgtcgccgcgatgagatggcatggctgccacatgctttgcttgcttggtcctcgtatcgtacgtcgccgtcgtcgtcttcttctggttattgcgctgctacctcgctgctctcgcgtatgcatgtacttttgcttaattttctttcttcatatcatgcactctggctggcctagactgcccccgatccatggtggccggtacgtcttgtcgagctcttgcatgtcgtggattctaaattcttcttctgcgtcgaattgtctctgccatgtgcgagtaataacaatcaaggttatacttacgatacaattacatggcggtttaattgctctctattaatttggtgaatcgaatcgattctactgaattcttctctgtcgtttaatgaaatttcctttgtcttttggattatataatataacacagacactcgatcacaaagacactcacaacgtgcgcacactcattcctataaacgcacacgcgcaaatcctactcctatcaagtatcaaaacttccaaagacttgaactggtcactaccggagaaaatggactttcgttcgaggacataattacttggataccgtttggttcacgaaatgtaacataaatggtaataataatgattcacacttaaataccggcggtaacaaatttgaataaggcgatatccatttgtagtgtggtatcaattacagctggatttaaacaaacatgatttaacgttatcggttacctattacgttaccaatatatgaaccaaacagcaccctgctttagaaccgataccaactcaatcatcagcatcactttttaactgttagtatcggtttgtgtcttcaataagtactaatgttaagtcattaacactggttgaatacaccaactgccgaagattgttcgacagtgaatatacgaggtatgtctatgaatgaaaacggacggaaacggttggaaaaatcactctcccatttccgtttccattttttatcaaaaacaggagcgggagcgatatagcaagaaatggaaaaggttgcgggatatacggttacacgaaaacggattaaaacgaacggatatgcaacgaaaatggatgctaatcggaaactttggctagaatatgcaatattttataatcactcagcgactacaatattaagagtttagaatactataaatcataacttcacaaatttaaaagtcgccacaaaaacatacgtttttttaaaaatcaacagcttgcgcaaatgcaacacttttttcgtcaacgttcttcaatcatcaaccccaaacttgtaga

SEQ ID NO: 532 - protein, 364 aa, Zea mays
MGSTAGDVAAVVDEEACMYAMQLASSSILPMTLKNAIELGLLEVLQKEAGGGKAALAPEEVVARMPAAPGDPAAAAAMVDRMLRLLASYDVVRCQMEDRDGRYERRYSAAPVCKWLTPNEDGVSMAALALMNQDKVLMESWYYLKDAVLDGGIPFNKAYGMTAFEYHGTDSRFNRVFNEGMKNHSVIITKKLLDFYTGFEGVSTLVDVGGGVGATLHAITSRHPHISGVNFDLPHVISEAPPFPGVRHVGGDMFASVPAGDAILMKWILHDWSDAHCATLLKNCYDALPENGKVIVVECVLPVNTEATPKAQGVFHVDMIMLAHNPGGKERYEREFRELAKGAGFSGFKATYIYANAWAIEFIK

SEQ ID NO: 533 - DNA, 3480 bp, Zea mays
acttttagtacttgttcttggcttgaacctgttggtgttttcaaccgcactaagggcttgttcgtttttgcgttaatccatgtggattgggtgggattgagtcggattaaatccatagcaaatcaaaatccatcccaatcccacccaatacacttcaatccacatggaatatcaataaccgaacaaggcctaaagagttgaaattcattactggttcgttactagaagtctagaaccagtactgatgatatctgtgcatatttagtactggttagtgtctccaaccggtactaaagacttaatattactagcacttgatgagggacactaataagtactaatgtactctatatggactccggtctgcatttaaaatcggtgttgatgcctatatgaatatgggttttaaaacaactcgaataaggggatgtttggtttctagggactaatgtttagtccctatattttattccattttagttccaaaattgctaaatatagaaactaaaactttattttagtttctatatttagcaatttatagactaaaaaggaataaaatgaagggactaaacattagtccctagaaaccaaacaccccctaaatgttgatgtaggaagcctagttctcttgccgtggcgtttacagaaaaaaaaagactaaagtaaagtagcattctccattatcggtcgaatttagaagagaatgtgcagactcatttatcgctgtttgctaagattgggatctcaatcatattcgtttccgttccaagcagcttttgccccggccgtttggctgcaaccttgcagggctcacatgaaatccctcagcatcctgctgcatatcatttgctaccttcatggcttcagtccacacttcacacctgcaggcttgtagctagctggattctcacacactccccagctcccacacgtcctccgatccgatccgatcccgatcctccagaagaggggcgagctgcaagcgtagggcggcagcatgatgcactcgcaccaccctcactaccatccgcgtttccacccgccgtcgtcctcctcgtctgaggcggtggacatggacccccgcgtgtggagccggctgccgcagccgctggtggaccgcgtgctggcgtgcctaccgacgccatccttcctccgtctccgggccgcctgccgccgcttcggcaacctcatctactcgtcgccgttcctccactcccacctcctcctctcgccgcacctccccttcttcgccttcgccgtcccttccgcggggtacccgtacctcctcctgctcgaccccaccacgcaggcgcccgcgccctcctggtcccgcctcccgctgccgctgccggccgcgcccggcgccgtgcaggcggcgttctccccggcggccgcgtcggcgggcctgctcgcgttcctgtcggacgcgtccggccacaagacgctgctcctcgccaaccccatcacgcgcctcctcgcgccgctgccgctctgccccaccgcgcgcctctcccccaccgtcggcctcgccgcgggacccacctccttcatcgccgtcgttgccggcgacgacctcgtgtcccccttcgcggtcaagaacatctccgcggacacgttcgtcgccgacgccgcctccgtcccgccctccggtttctgggcctcgagttccatcctgccccgcctctcctccctcgacccccgcgccggcatggctttcgcctctggaaggtagttaaaggctgatgaagcgcacgcacgtgtgtgcgggattattatttgtccatgcatacattatacataacatacacacgagcatacggcagtggcatgagattgagatgaatcaaactaagctgactacagcatgcaagttccactactgcttcacttgttgcaggttctactgcatgagctcgtcgccgttcgcggtgcttgtgttcgacgtggcaaccaacgtgtggagcaaggtgcagccgccgatgaggaggttcctgcggtcgccggcgctcgtggagctcggcggcgggagggagcgcgaggcggtggtggcgctggtctccgccgtcgaaaagagccgcctcagcgtgccgcggagcgtgcgcgtgtggacgctgcgaggcgagcacggagctgctgccggcggaagcaacggcggcggagcgtggactgaggtggcgcggatgccacccgacgtgcacgcgcagttcgcggcggccgagggcgggcgcgggttcgagtgcgcggcgcacggcgacttcgtggtgctggcgccacgcgggcccgcgagccccgtgctcgtgttcgactcgcgccacgacgagtggcggtgggcgccgccgtgcccgtacccgtacccgtacgccgcgggaggcgcggggttcagggtgttcgcctacgagccccgccttgcgacgccggccatcggtctcctggacgccacggcgccggcggcctttttgcatgggatgcagggctagctaggtgctaggctcaggcgctcagctcattgacgtgtacgcatcatctacgtaacggaaatcgttccggtctctgcgttgtgaggtgcaccatgaaatctggtgtttttcttgagcgtctgttagcgaaggctgctggtaagaactctactactggtctgaggcgtgtctttaatatattagtactattaagtatctcatgataatttatgtgtacggggccggattattagttatatgaacatttaaacttgctttctgcataagtatttgcaatctaaaatggaccatgcatgcaagagtgaagtcttgtctgcagagagatctggtttttggtgtgtgtggtttcttttctgtgtggccagtggcttgtaggccaatgaatttgctggtgctgctcccgttcgatcatatatatgcctattttatctcttgtcttgaaaatcatctgatgaagttagttcacgcacatcatcttatgaagtgcatgatttcacccatttctgcgccttatgaagtgtgtttttttttctcaaggcatttcgcccattcacatatggatcacactgtagtttaaaagaccatgcaatattatcatatataggccaaaaactcatacatgagccaagacaagatgctgaagagagctaaatcaagtgctccattatctcttttaatcgaatccaggatctgctggaaaagggaacgcgattttattctaagatagttttaatttatgtcaatatgatcttttcttttcttttattggagggatatgttgtgggatggaattgtttcatcctagtttttcaaggctttagtactaggataaggggtgggaagtggctcctatatacaagaatattcttctagatgtttgacaagccaatcctaaaaacttactgtggcattgttatccctcttgcaatgtgatcagggcaatgaatctgagatcctaaaataagatggagccattaggccccctttggaacataggact

SEQ ID NO: 534 - protein, 436 aa, Zea mays
MMHSHHPHYHPRFHPPSSSSSEAVDMDPRVWSRLPQPLVDRVLACLPTPSFLRLRAACRRFGNLIYSSPFLHSHLLLSPHLPFFAFAVPSAGYPYLLLLDPTTQAPAPSWSRLPLPLPAAPGAVQAAFSPAAASAGLLAFLSDASGHKTLLLANPITRLLAPLPLCPTARLSPTVGLAAGPTSFIAVVAGDDLVSPFAVKNISADTFVADAASVPPSGFWASSSILPRLSSLDPRAGMAFASGRFYCMSSSPFAVLVFDVATNVWSKVQPPMRRFLRSPALVELGGGREREAVVALVSAVEKSRLSVPRSVRVWTLRGEHGAAAGGSNGGGAWTEVARMPPDVHAQFAAAEGGRGFECAAHGDFVVLAPRGPASPVLVFDSRHDEWRWAPPCPYPYPYAAGGAGFRVFAYEPRLATPAIGLLDATAPAAFLHGMQG

SEQ ID NO: 535 - DNA, 3432 bp, Zea mays
ctgacaatgcattgtaaatccagccgttgatgtgaagtaacagaccgtcgaacgtaaggttatttttttaccctttagaaccaacagacatttgtcgtcggatataaatcttaagtcgtcgcacataatctatgtccaacgtcgtggacttcgtaatgttatggctttactgttgtgagtcgttgatggctgttttgctttagatttgtacctcgggtcatattcgattccgttccaatcaacttctgtgcccggttgactacaactaggggtggacgttcgggttactcgaaaattttggatcggataattcgggtatctaaaatttcgggttttgacaatcgatacccaaaattacaacgggttttacaatacccaaaaattcgggtacccggaatttcgggttcaagatcgggtattcccgaactgttgtgtcagcttcataaaaataatgcaccctatcaaattagtataaaaatatagtttgaataatgatatacatagacataaaaacataagcaatctacgatctcaagtcatgcacacttatacataattatagatgcacaaattaataattaagtatgacatgcgtacatgacacatgaaagttcggataattcggatataccctattataataaccgaattacccgaaataaattcgggttttgcaagtttctacctgaaattcccgaacaaaatttaggttttggatatttcaggtattccatattcaggtatttcgggttacggaatttttacccagccctatctacaactgcaatcttgccggcctcagatgaaatccctcagcggcatgccccatatcatctgttacttccttcctctagctagttctagctacttcgtggcttcaacccaaacttcacagttcacaccagcagagttgtggtagttcccagttcccggcccacgtactctagtaatccgatccggatccccccagaagaggagcgagcgtagggcaacaagcaacatgatgcaccagcaccaccctcaccaccttccgcgcttccactcgccgttgtcctcctcatctgaggcggtggacatggatccccgcgtgtggggccggctgccgcagccgctggtggatcgcgtgctggcgtgcctaccgacgccgtccttcctccgcctccgggccacctgccgccgcttctgcagcctcatctactcgtcgccgttcctccattcccacctcctcctctccccgcacctccccttcttcgccttcgcggtcccttctgcggggtacctcctcctgctcgaccccaccaggcaggcgccttcctggtcccgcctcccgctgccgctgcccgctcccggcgctggccaagggttctccccggcggccgcgtcggcgggcctgctggcgttcctgtcggacgcgtccggccacaagacgctgctcctcgccaaccccatcacgcgcctcctcgcgccgctgccgctctgccccacagcgcgcctctctcccactgtcggcctcgccgcgggacccacctctttcatcgccgtcattgccggcgatgaccttgtgtcccccttcgcggtcaagaacatctccgcggacacattcgtcgccgatgccgcctccgtcccgccctccggtttctgggccccaagttccatcctgccccgcctctcctccctcgacccccgcgccggcatggctttcgcgtccggaaggtgaagtcgcaagtctcaactctcaagtgcacgtgtgtgcagaatgtgtaacactatgcatacacatgagcacacggcatgagatcaaactgattacatgtaagttctactggtttatttactgttgcaggttctactgcatgagctcgtcgccgttcgcggtgcttgtgttcgacgtggcggccaacgtctggagcaaggtgcagccgccgatgaggaggttcctgcggtcgccggcgctcgtggagttcggcggcgggagggagcgcgaggcgagggtggcgctggtctccgccgtcgagaagagccgcctcagcgtgccacggagcgtgcgcatgtggacgctgcgcggcggagggcacggagtcgccggcggaagcagcggcagcggggcgtggaccgaagtggcgcggatgccagctgacgtgcacgcgcattttgcggcggccgagggcgggcgcgggttcgagtgcgcagcgcacggcgacttcgtggtgctggcgccacgcgggcccgcgagccccgtgctcgtgttcgactcgcgccgcgacgagtggcgctgggcgccgccgtgcccgtataatccgtacgtcggggggatcgccgcgggaggcccggggttcagggtgttcgcttacgaaccccgcctggctacgccggccatcggtctcctggatgccacggcgccggcggcgtttttgcatgggatgcagggctagcttggtgctagctagctcgtcgatcatcaatcgtttaattactggttccctgcatgcattttctagatagtgggtcgaaatcattcgggtttgatctgcgttgtgaggtgaacaacatgaaatttggtgttttcctgtgaaggcctgaaggctactggtaagtccgctagtttgaggcgtctgtctttgtgaaagcctctttcgtatatgttccttagcactattaagtatgtggtatttcatgattcatgtatggggataactatatgaacatttaaacttggtttcttcgcataagtatttgcaatccagaataaaccatgcaagagcgatgtcttgtctgctgactccattctggcttgtggagagtggttttgtgtggacacagtgatactactactctaatttgctgggtgctgctgacctttcgatcaagaactcatgtgcgcctattttatctcttgtcctgtcatatgagatcatctgatgaaattcatacgtactccagcgcagcaagggtgttttcgtaaggtatgctacaaggatatgtttttctcaaggcatttctcccattcatcacatatggaccatactgtaggtcaaaagagaatgcaatgttatcataggccaaaaattcatacatgatgagtctatcctacaagctgctgtcacacttcataatatctttcttttaatcgaatccagtatatatccatatagtatcatgtgtgcttgtttttttttataaaaggaagttatttgattacgctcttgtatatgttttacttgaaaatatttactttcagtagatatgaatcttggctgtaagattgaagaaagaagcgatgaaccgatgagtgtctgggaattgagctgttttggttagttttgatggattcagtcccaatcagttaacaatatatcaaaggtttttcttttgtaaactaggtccactttagtgccatctcatgaattacatgatttctcatttatggtagtg

SEQ ID NO: 536 - protein, 433 aa, Zea mays
MMHQHHPHHLPRFHSPLSSSSEAVDMDPRVWGRLPQPLVDRVLACLPTPSFLRLRATCRRFCSLIYSSPFLHSHLLLSPHLPFFAFAVPSAGYLLLLDPTRQAPSWSRLPLPLPAPGAGQGFSPAAASAGLLAFLSDASGHKTLLLANPITRLLAPLPLCPTARLSPTVGLAAGPTSFIAVIAGDDLVSPFAVKNISADTFVADAASVPPSGFWAPSSILPRLSSLDPRAGMAFASGRFYCMSSSPFAVLVFDVAANVWSKVQPPMRRFLRSPALVEFGGGREREARVALVSAVEKSRLSVPRSVRMWTLRGGGHGVAGGSSGSGAWTEVARMPADVHAHFAAAEGGRGFECAAHGDFVVLAPRGPASPVLVFDSRRDEWRWAPPCPYNPYVGGIAAGGPGFRVFAYEPRLATPAIGLLDATAPAAFLHGMQG

SEQ ID NO: 537 - DNA, 6325 bp, Zea mays
caattacatgttaaaatagaggcatcgatacaattgtaccttttatatagcagcatgcgccctgttgggatacaattgtacctttcacatgtcttctagatggttcccaaccctttggccaagatcgtacagataatattgcgaggagcccaaatcaacggtgtccatatgttatgttgatgtggatggtttacctaggcgcaaaagtgcgctggtttcgtccgtacaaatatactttaagtatggttttgatttttttctatttttcattttttaaataaaacgagacaatcaaatctgatataaaaatcaaatgaattataaatagagacggaaagagtatatatatttgttttgctattatttaaagtattaaaagatagtggacgaatgaacgtcctctatgtttaaaagaacgttttagaggacgttgtgttgttgaaggaaatatgaaaaaaaaatcttctgcatatttagaagggaggagcgtttacacattactttcgggacttcaacccaaatatgtcaaggtttgtgagtggctcagtgcggaaaaaaaatcctatatataccagatgtaaacactatcttttacagcctatcacattcacatttagaggttcacaaagatagatcaaaatttataaaataatcatttaatattttttttattttatttatatggataagcagctggtgtatgtgaggagctgtaaaagatattttttacatccgagatgtaaagattttttttaactcaatgctggttaccggctgggaggacgatgataaagaaagcatctctcactgcattccgggcccactactcaaacgttcggcacgccaggttggcaggtagccgttacatcgataggcactcggccactcgcacgcagacaccacaccagtgtgctcagtgctcactgctcaccataataacgctgcacctcttttcatttcaccatctcctgcccccttaaaaaaaagactcaccgtcgacacgccctcccgtcccgagagttctgaatcgaaaccgtcggccacgagagcagtgcgaggcgcccaccgcgatggctcgaaccaagcaccaggccgtgaggaagacggcggagaagcccaagaagaagctccagttcgagcgctcaggtaacccgggtcccgcgctcccccccgcttcgcaagcagacgctgtcgcttctctccgaccctggtgctaagcacgttccttgttccgtcttttgcaggtggtgcgagtacctcggcgacgccggtgagcgcgtgcgtgcggggatcagttccctccttttgcctttttttgttgggctgctcttacttgcttgcaagctgtttgatggaatgcaggaaagggctgctgggaccgggggaagagcggcgtctggaggtgactcaggtgaggacctatttgtcgttgctggatgctgggtttcgcttgcaatctaattttgttgcaagatgagggcgaatgtgccagttccatgtgggtgtcatggtctcggagttactaccttaattgctcaccatagtatgttttcttaaaaaaaacagttaagaagacgaaaccacgccaccgctggcggccagggactgtagcgctgcgggagatcaggaagtaccagaagtccactgaaccgctcatcccctttgcgcctttcgtccgtgtggtgggtgcaggcgtgtttgtcctctgcatagtatggggttgttccgcattctgtctaatggaaagttattcttctgagaaaaaaaatgcaggtgagggagttaaccaatttcgtaacaaacgggaaagtagagcgctataccgcagaagccctccttgcgctgcaagaggtcagttatgaaaaatgtcttatctctctgttaagatcctcttcatatacatagttgctattgctatcgtgaagtcttttttttctgttaattggtctggtactacttactagtcaggatttcatattgcggtttttcctagtggtgtgtagttaaaaagtagtttaattgcttttagttaaaaggggtgttcagggctaaagatcaactatgagaaaacagaaattttcccaattcgatacccgacagcattatggcctgcgctaatggaggtgtttccgggcaaatactctagcctacctgggaagtaccttgggttgccccttcatttcaggaaagtaaaaaggaatgatcttcaacctctaatcgaaaaaatcaacaacaggctggccttgctggaaaggcaagatgttgtccaaggctggtatagaaactcttgtaaaatcgatgctatccgcacaaccaatctaccatctaatggtttttccacctcaaaaatggctgctgcaaacaattgacaaaatacgaagaaacttcctgtggagagggagcaatccagaagtttgcagcgggggtcactgcctcgtcaactggcccgtaacttgcctcccaaagaacaagggaggtcttggaattctggaccttgatcgttttgcgagggggctaagactaagatggctgtggctacgatggaagagcaaagatagggcgtggactgccttgaagcttccttgtgacaaaactgatgaagatctcttcaatgcttccacaactgtcacggtaggcaatggaaagatagctgaattctggaattctagttggatccaaggccaagcccctaagaacattgcgccaacactgttcaagaaggaaaagaggaagaacatcacggtcgccaaagcgctcactaacaacaattggattcgtttatgctcaccatacacgggtgagggggagtttagagaggtcgtctctctttggcaggccataggtaacatgcaagagcttaacggtttggaagacaacatctcttggagatggacggcagatgggcagtacagtgctagcagtgcatacaaaatccagttcgcatccaatttcactaaaatgaacctctgccctatttggaaggctaaagtggaaccgaaatgccgattttttgcttggacactacttcataagagaattctgactgccgataaccttcataaaagaggttgcaactcagcctcagaaacaattccccacttatgcaaggattgcccctttagtagagaggtgtggaacaaagttttgtctcgggccaactttcctttactgactgggtctcccagtgacacttctttgtatgattggtggacggacatgtgcagcctttgcagcagacaggcaagaagaggtttcgacggtctgctatttcacttttggtggaacttatggctggaaagaaataacagaatctttcaaaggcagcgtagaagtgtagatcaagttgctctggcagtcaaggattatgctagtagctgaagtctagttggtttggactagtggttttgttgcttttctttttaatttctttttagttctttttatgttgttttcgtttccttaagttgcttggagtctgtattatcctctttcttctaatatagatcggagcgacaaaccttttgccccttcctttcaaaaaaaagttaaaagggaatttaactgctttcctagtggtgtagttaaaatggatttcatattgcggcctttcctagcttgcttgctattgattggactatagtgatccaaatgctgataactttgtcgcttgtgtaggcatggttagagagcttagagtttgcatttattcaataccttgagactgcatttcatatacataaattattcatgattatttcttttctctatttgttctggttaattaagagttttaggtttccatatttttgtacgtgcatcatttaaattcttgtattgtttttcgttcttgtctacaggcagcagaattccacttgatagaactgtttgaaatggcgaatctgtgtgccatccatgccaagcgtgtcacaatcagtaagttatcactgagtgaactcctttttctctgtagcattactcctaatgaatatgtgtgatgcattttggttgcacgattctttagtgattctgcttcagatggatatgataaatctagatgttattttgaagtggcgaattgcttacgagcggaaatagtaatgttcaaatagcgcaaagtgcaactgttgacttttagtaggccatttatatggtttgattaccaacaaatacgtcaatcatatgatttgattatcaacaaaggaatcagctatatggtttgattatcaacaaaggaatcagctaggtttgcttatcaacattcaacaaaggcatcaagtaatactccatccgtttcaatttataattcgtttgactttttttatctaagtttgatcggctcgacttattaaaaaaaatcataattattgttaatttttgttgtgatattgtttagtataatatactttaaatgtgactttgagtttttcattttttcgcaaaaaaaaatgaataggacgagccggtcaaacgtgacacaaaaaagtcaaacgaattataatttgggacacacggagtagtaaataatgtaacaacttagagagtgggacaaaaaaatctctagtggtgctaaatttagttcagctttgtataaacacaagcattgattgagaaatctgacaactcaaggatctgtaggaaatgtgttaccctaaatgttttccttactgatgcagtgcaaaaggacatacaacttgcaaggcgtatcggaggaaggcgttgggcatgatatataatatccattctgattgcatcattcttgtgaatttgtttgtaggagctagacattagtgttgttgaatgctgcatggttcctaatccttttcgcagtctaacatctgtggagttagtatgttacatggcaacagctgaacatctgtggactatatggcaacagccgaagattgtgtctgtgggataactggttgttttggttgctcttcagtagtttgtttgcttcaggtaaccatgctgcgaactatgatgttttcattctcggtttgcttcagctaaccgagatcgattcagtctgcagtatggactatggagtaaactgcatgctgaaacccgaaccactgctgaaactgcatgctgaaacccgaaccactgctacggcagttgccaggatagcaggagggcctttatgcacagtggaattgagtagagaactgagtaaaccatggttctttctccttttgaactggaacacacacagttggatcttgtttctcttcttaggccattcatcgtgtttattaggggtgtaaatggtacaaatattatctgtccgtattcgaatttgatctatctaagaaggttgaaatccgatccgtattcgagtccacgtattcagtacccgatccgtatctgaattatattcgtacccatatattcaaagttggatatttaagatgtcgataccaattctaatcttatctgtcataactcgataatatctgtatccgattcgaatccgaagagaaaatatgaaaacaaatatgtacaagcaatacttgtctgtatctaatttgattataccactagtgtttataaacatgtaaaatattgttttttgttttgtacagttttatactataaaattaaagagtgaagtttaaaatataagacgagaataattaagcaccctatatgcgttgatgaaccacttaaataattaagcaccgcctgtgatccaagcccgcacccacagggtcacagagaacttgggaagagaatggatcacctagtcaccggggcgcggccttgcgatctctgtaaccactcctctaagactttgtttttggttgaggagccaagtagaacggagccgttccatttctaattctaagaacgaagccactctgttctgtatttggtaagctggaacggagcgactctgttttttttgtttggttgcagagtgaactggaacaaagcggctctattttttgtttggttgcagagggagacgcgcgagctgctgcgcatggatgggagggcgagctgtgtgagcgggctgggaacggagcggctccgtcccattaatttttttggagtgagatggtttcgaatctaaggagaatattcactaattggagtcactccgttctggctactttgtaaccaaacaacaacaaaactgagacagaacgactccgttctacttggatctttaactaaacactacctaaattcttcattagaactcctcaatccggctgagctcttggtcggtgcgaactcgcctcaatgcttgcagtgtttctgcgcgcttttggcgatcgatttgtctgctaggtctagcggaaggtcacttctaagagcatct

SEQ ID NO: 538 - protein, 157 aa, Zea mays
MARTKHQAVRKTAEKPKKKLQFERSGGASTSATPERAAGTGGRAASGGDSVKKTKPRHRWRPGTVALREIRKYQKSTEPLIPFAPFVRVVRELTNFVTNGKVERYTAEALLALQEAAEFHLIELFEMANLCAIHAKRVTIMQKDIQLARRIGGRRWA

SEQ ID NO: 539 - DNA, 8816 bp, Zea mays
ggtaatctttgagctgaaggtcctcctgggagaaggtgattgggatgtgagaccatttggacttgatgaagggtccctgcacctcaacatgctgcaccgttctctgcgcttccttcttctgcttcttgttagccggctctgaacttgaaccgcctattatcgggagcaccagcttcgtagccgaaggtgctacgacttggttgttgaacgaagccatcagctcaaaagtggaagtgagttcaccggaggtggggcgccaatgttgggggacttgttctcaaattctatgagttaagaataaggcaacacaaaagaggttaatagttaatgcccttcgtccttcgaagcattatttcccttagggtataacgatcttcggacgaaggttatgaaggacataccttcatcatcacagtatatgttaatgaaagaagaagcatataaaatatgagaaataatataaataatcatatgccatcattaatatatctttattatatcatcatggatgaataagaacaatattgaattacatttgtaccttcgacttaacagaagacaaaagtacaagcgtgacgtacgagcgaatacaagccagcgtgaacagtatgggagtactgttcacctatttataggcacgagacgcagcccgatcaaaattaaatttatgtcctcgacaactagttacaatcatgacacaaattatcgtggaccgattggtcttttcctctttaagtcggtgcagctcttcgtctcaaggtatgtcgctatgtcgaagctccctggatggtagcttcagcatgcaccttcgcgttgtatttgcttatgtgctgatatttcgaaggtgtttatttttaaagaagcttcggcgacgaagcagaccccaataacgatagcccaatacaattctatttaaaaccaatcgaactatgcttacttagatccacgaacggacagtgcccgctcgattaaattggtacgatccataacgagtcgggccgtgtcggtacggacggcccattagccacgtagagtcgacccgccgccccgttgtagccccggtcccacctcgcacgccctcaggcctcgacatccactgccttccgttcgtctcaatcccccgtcgcattccgcaacacctgctcctcgcccccttctctcagaggcgacgcctcgggcgctcctaccctgccccgtctccggtccccccgcgccgtcggcgaggcagccggccgtcacagaagcccgatccggaccccgcgaggtcagttgagatccctcttcttcctgctcctcctcccgccgctagatctgctcacctcaccacaccgattggccacttccgatcgccgcgccggtcctcgacaccgccgccgctgccgtcgtcgttctggagttcgggcctccttcgctcgcgcgtctacgcgtggctcccatgccagatctgttttttttctggtcgattgcctagttttggaatggttgccctgttttgagttctcttctcacggaacggtttggatgctgtgtggtgttggtggctaggtacgttggtaactagttatctggatcaatcattgctcgtgctgtgttgtagatgagtagatcgcgtctgcgtctgttgtccatatcgttgtgtgcgtgggcccctcgtctcgtcatatcgagattcgctcgtttattcaggtgctgcgagcatgcaattttgtagttgatatgtcgctacataaatcagattttagaaacaacatccaggtaaaaattttatcccgggaattttctccacgcctcctgagtgagaagaagaggcagccaaagaaggccgaaggctataaataaacactcttggtgtctgggcaccaaatgactagatttattcatgccaaattttactttcgtggagcatttgtctccactcgattcaattcctcagaatgtttagatgcctagtgatgatgtttctttcctgaaatcacatttacaggcaatataaataggagcctttgtgtggaatcttttccgggatcaatcaattataatcgtttgaactgaagcccatgccatttttatttgggtagttgagactcacagtagcattcaacatgccagcatgaattagttaattttatttggatcacatattcacatgtatcacagagtcagtagtattcttgtgttcttcaagcaagtcaacccagagagcttttagtcataaatttgcagtggtttggttcatctattctttggttatgcgccatcagagatctgtttttgtatattctatccaaatgttcctttctaatttgcttctatatgtttatgcaaccaaaagttttgttaaacttattctattttattttcttaggattttttatatagttacaaagctcttaatattgtttcctcatttatcaattcagaaatccttgttatacctgatggctatgattgatgagcctctttatccaattgctgtactgattgacgagctcaagaatgaagacatccagttgcgtctaaactccattagaagactttcaacaattgcacgggctcttggagaagaaagaaccaggaaggagctgattccttttcttagtgaaaacaacgatgatgaagacgaggtgcttcttgcaatggctgaggaattgggtgtgttcattccgtatgttggtggtgtagaacatgctcatgttttgctcccacctttggagacattgtgtacagtggaggaaacttgtgtccgtgataaagcagttgaatctctgtgccgtattggtgcacaaatgaaggaaactgacattgtcgactggttcattccagtagtaaaggtaagaggttcatttatagaaagtatttggtgtaatgttattgtaaataaatattccgccattgttactgcatttagtatttgttgatgtgcttttgttggctcaaacaataaaaactgtatttcatgtcatatgcactatttatctaattttcctttaccttacttggctagttcactgcttagatgtggcaattattttctccacttcccatgctttagtaatttaatgtgttgtactgataggcctcttcattttgttagatgtagttggcagtcagctacgctacatgggtcagatcggccgtgttagcgtggtgtgtgtgaatcaccactgtaatgggcccatcccagcccatgtacttatctatttataatacagccccctacacaattagggttaatgtttccaatctaacaggcaatatgagaggctaattgggtttatgattagagatacgattgccacctttcttaggcatcaggtaagcctctatataagaatatgagatgtatgaatcaaaggcaatcaagaattatcttagagaccctcgtctactcttgggccttgagattgggcatcaccatccttggcgtgctaaatatcagtgtttggtttggcatccattcactctcgtaccgtcaacccctgtgttctgcacatctccataatccaggactagcaaagtgcccttacattgctacgatttccatttatacttgagtagagaataaaagcacaaaaacatgtgttctgttggccaggtaggtgtgagtgtcggtttggagcaaacaatcatggtccgaatccccatttgtacataattttagctttttaatatttaaatgtgggggaccacgatgactgtgggaactggtgctttatatagtagatagatagagatgcgttacactcgagtactcgaccaaatagctgttgagtcaagcagcatttttctacatgcagtcattgttttgctttctttaccatgtgcactgtcaactgatactctaatatttctctgttgtagctttgcatttgcttgaacttcaaatgacattataatatgcaaaacattgattggttaagatgcatggttttctgagtatagcatctcctgctatggtaccatacgatgccatactacatgccttttcatacgactacagttttaccaattcatttgtttaaccttcagtgtttattattagaaatacttgtgcatgttatttcatgttatgttctactagtacttacaagtccatccatcaattttaaactatccatgttttactctgttcagaggctagcagctggagagtggtttacagctcgcgtatcgtcctgtggtcttttccacatagcctatccaagtgcgtcggaccaattgaaaacagaattgaggactatctatggtcagctatgtcaggatgacatgcctatggtcagaagagcagcagcatcaaatcttggaaagtttgcagctacagttgaacagaatcatttgaagacagaaataatgtcaatatttgatgatttaacccaagatggtacattctatatacagtttcaatgaaatgtgttgtgttcctccgtttgtttcttgcttcttgcactgattattccctgttatttgtcctttttttcgagataactgattgtgtatcatttttctctaaatagtttcccctatgcttctctgattatcattggggcctgaaatttgaaagaaaattttaaatatttttctctttcatggcaaaaaagtcttacaaatttgaaatcttttttcgtgatgctcgaatatctttgtcagggcctaaggaggattagacaaggatagacaaggattagacaagtatagttagagataagattagaagattagttgagattatctaggaaggttatcggttagtatttgttgagagtttttaggagagttttgaggagatgaggatctctagctagataggggcggccagctggcctatttatgtaatcaatggatgggaaataaagtaggcaagaattagaagggagaaacccccctcttgctcggccgtgggcagaggcccccagccgacgttcctgtccatcgacacccctctccaatccctcaccgatctagcgaccataacaatcttaaagccagaattttctctgaaaagcgcactacagcaggcctaaaatatacatgtgttttggaacaatttattcatgattgaatttgaatcattgggttagtgtttgcatatagtcatacgcatttgggacatcattaggactatgtctaaacctgctggtctttattttcagatcaagattcagtgcgtctgttggctgttgaaggctgtgctgcccttggtaaattgttggaaccacaagattgcgtagcacacattcttccagtcattgtcaatttctcccaggtacattgctcccatgttggacccatacatcctgcagcaagtaatttgctttctttgtctggaaatattattccccagaccccacccgtgggagcttccagcactgggtctgccctttttgtcttgatatattattggaagacatgtttgtagttgctagaggttgataatttcttagttttgcaacttgttgcagttaagtgcatcaccactaacaaatgctacttgcttgtactcttttgtttaggataaatcatggcgtgttcgttatatggttgccaatcaattatatgagctctgtgaggctgttggccctgagcctacaaggtattatttgtcctagctgaattcaacctattattgcagggaaaccatgtgtctgaattcttgagtatcatgtaaacccatagccttttcaaatggattaactgtaaatctctgcttttgggattagagctgatttggtgcctgcctatgttcgcctccttcgtgataatgaggctgaagtgcggatagcagctgctggaaaagtaactaagttttgccgcatattaaatcctcagctctcagtccaacatattcttccatgcgttaaggtgggggcaaagcaattattgaacaccatttcgttgctatttttcttctgagtgaattaactcatgccaagtgcatctacaggaattgtcatcagattcatcccagcatgttcgttcagctttagcctcagtgattatgggaatggctcctgtactgggaaaggtgatatcagtgatgcaaacatgtgtttccagaatatggtgttgacaactgttgacattccatgtaagctgatcatctcttctttggcaggatgctaccattgaacagcttgttccaattttcctctctttgttgaaagacgaatttcctgatgttcgacttaacataatcagcaaacttgatcaagttaatcaggtcagtaccattttttttgttattagatttatttgccttttcctttctgttttagatttttaatgtaatcttttataagctagctagccattagtatgctagatttttttaagttgatgtccttgaaagccttgcctttctcttcaaaattatctgatgattgctgatttttgttttgatctttcaggttattggaattgacttgctatctcaatcactgctaccagcaattgtagaacttgcagaggataggcactggagagtccggcttgcaataattgagtacatcccattgttggcgagtcaattaggtgttgggtttttcgatgacaagctgggggcgctctgcatgcaatggttggaagacaaggtttgtatcattagggttatgtcaaaacagtatctctttggagctgtctccagcgtctttatcttatatccttgagtgcatattggactttgtaatgtattgactaaaattgtcagtttaactaactaaaatttggatttcaggtcttttcaatcagagatgctgccgctaacaacttgaagcgccttgcagaagagtttggtccagagtgggcaatgcagcatataatccctcaggttatttatatactatctcaataccttatatttcctacaactgtgctgtgcataatataatccttgatgctaatttatttatcaacagtagctacaacatttgtaaatgttagctatctctaaaagaggagtaaaattcattattatctccaaaacaattgtccaaccccccaaagataaattgtcattgttgtgatggcatggggtttctgctagtctttacaacccactcgcttgttttcccaggtgctggagaagatcaacaacccacactatttataccgcatgacgattctgcaggcaatctccttgctagctcctgtcatgggtgcagaaatcacctgtcaaaagctgcttccagtcgtcattaattcttcgaaggacaggtgtgtgactagaagaatgttaaagaaaaatctaatcttgtcagtttctgaacaacatggtctaaaatttttcagggttcccaacatcaagttcaatgttgcgaaagtactacagtcacttgtaccgatcctcgaccaatctgtgagttcctcaagctattccgcccacatgttaccaacattttcgaagaaggcggtacatctgtatttttcatggtattggggaatatcatcagtgcttactccgcaggtggtggagaagaccgtgaaaccgtgcctcgttgagctcagcgaggaccctgacgtcgacgtaaggtactatgcaaaccaggcactgcaggcgtgcgaccagatgatggtgtcaagctaactagcctttgtgtcaagtatttagagagttcgatcgatgctccatagtccaattttggattacctgtaatttggcctttagatttgaagagttgtttgtgtctagcctcggtaacagataaaaacggacggtcctgatccccttgttcgtttgtgttaattaatgttgtaattgagcaggacacaacgcgttgctgtgtgtgtttgcgtttacatggcagattgaactttacggtttgcttgcgctgtgcgatgctgctggcctatctacccttcgtcaatcatcacgtgtactagcgcgtagtgtggccgtagcccaccaagtaaggccttattcgtttagcatattccttgccgggatcaaggccaaaaccctatggatctcccctggaaaacataccggcccatgagaaaatagatgttcggttaaatcctgtgtgggctgcatctcggtcttttctcgtcgctccagcttgggaatcagacctgatctgcgaggccccgccccgacggcaagagccgcaacagagtcagcacaaggcgcgtgcgtgaagggcaagccacaagcgtcgatggcggcgtcagtggcacgaacacaggattcctctctccgtcatcgatctccttcggcggtggccttctcaccggtattcttctttctctctccctgtctcaactagggcgtttagggttcttgcgtctcttctgatccaccggtattcttctctctccctgtctcaactagggcgtttagggttcttgcgtctcttctgatccaactgcttaggcggcgacgagttcttagatccaacccagctagttcttagatccaatttcgagggaccatcccggcggcgctggccaaatgctcagcgctgctccacctgagccttcaagggaactcgcttaattcgcttcgctccgccgtcggccgaagcgcaacgtccctccaaagcggtgagccgcccctgaaccggctaactgcccctgaaccgagcatgtgtttccctgctgtcagctcagctgcgaggagtagtaaccggccaagggtacacgaatagttgcatcgagaataaacattagtctcttgattgatgttaccacgacacgaatcataggagaataaacattagtcttcgctcagctgactcactatacgattgcagactgactaattggccaatcaatcagagcaatcggttttggccggcatggcctgcaggcttggcggaagcgct

SEQ ID NO: 540 - protein, 583 aa, Zea mays
MAMIDEPLYPIAVLIDELKNEDIQLRLNSIRRLSTIARALGEERTRKELIPFLSENNDDEDEVLLAMAEELGVFIPYVGGVEHAHVLLPPLETLCTVEETCVRDKAVESLCRIGAQMKETDIVDWFIPVVKRLAAGEWFTARVSSCGLFHIAYPSASDQLKTELRTIYGQLCQDDMPMVRRAAASNLGKFAATVEQNHLKTEIMSIFDDLTQDDQDSVRLLAVEGCAALGKLLEPQDCVAHILPVIVNFSQDKSWRVRYMVANQLYELCEAVGPEPTRADLVPAYVRLLRDNEAEVRIAAAGKVTKFCRILNPQLSVQHILPCVKELSSDSSQHVRSALASVIMGMAPVLGKDATIEQLVPIFLSLLKDEFPDVRLNIISKLDQVNQVIGIDLLSQSLLPAIVELAEDRHWRVRLAIIEYIPLLASQLGVGFFDDKLGALCMQWLEDKVFSIRDAAANNLKRLAEEFGPEWAMQHIIPQVLEKINNPHYLYRMTILQAISLLAPVMGAEITCQKLLPVVINSSKDRVPNIKFNVAKVLQSLVPILDQSTVKPCLVELSEDPDVDVRYYANQALQACDQMMVSS

SEQ ID NO: 541 - DNA, 3116 bp, Zea mays
aaaagcctgattaggatatacaactacaggcgccagtacgtactaatcgtccttttgagcattctgtgaagcagaacagaggcggcagagtttcagaagttctgctgccctgttccagtccttcataggtgcaaccgtgcaactgctatactacacgtaggaacagtacatcttcagctatactaaattcagttttttcttcttcttacaaacgcatattttaagctacagcattggcaggccattgctcgatttgtttttttctcggtggttggacttacatgcctacaggaaaactaaaacaatacgtatatgtggttttctgataatcaaatcaaagggggaggggggatgtgacaccagaactagttctttcccatcacccattattgtttgcttttgcccagtctcgcgaagaaaaaaaaatgaaatcaaaagaaaatatcaaagcgacgagcagcgacaactccacgtctggagccaggtgatgtatgagtgcaggtactacacggtacatagattttatttttttaaaaaaaaatcataagcatttattttatttatccccaaattatgaactggactttgctcgctggtctcgcagcagccgagcccaactgcacacaaaagaaatgggcgcatgagcaggcacagaaaaactaaacagagaaagcatgcattaattagaccaaacccaaaacccctaagcaaaagattagcaatgattggcgtctccattgtgcacttgcacaggtactagtactcctgctaggcttgttgttgtagggtgcctgccccatgcagtgcaaggagggaggggtgtgtcaccataaaaatttagcggcaagggcgagggcgattggaagctcaaaataatgagctggttgcccaccggggagacacgccggatttgtttaatcccctggccctaatcccccagccctgccgtctcctccttataagcaatggcggaggggtcttgctcttgcattgcacctccggccaccgcgccatagcccgcagtaattaagcaggcgagaacgacgaagaggcggtcacgcaccacaccgatcaatccagctcgagcgaccgatcacacgtgcagcacagcacagcacagcggtgctcggcgaagagagatgacggggttcgggtcaccgtgcggggcgtgcaagttcctgcgccgcaagtgcgtgcgcggctgcgtcttcgcgccctacttctgccacgagcagggcgcggcgcacttcgccgccatccacaaggtgttcggcgccagcaacgtgtccaagctgctcgcgcacctgccgctcgccgaccgcgccgaggccgccgtcaccatctcctacgaggcgcaggcgaggctgcgggaccccatctatggctgcgtcgcccacatcttcgcgctacagcagcaggtgtgcatgcgcgactgccccgccgcgccgtctctgggcttgtctcttaattgtgatagggtttaattgctgaccggcccgtgccaatcgatccaggttatgaccctgcaggcgcagctggcgtcgctcaaggcgcaggcggcgcaggggcagcagggcgtgcacgaagacgccaagggctacgtgggcagcgccgccgcggagcagctagggtacggctacccctggtgcagcggcaatggaggcgccgcagcagcagcagcaggcgccgtgggcgcgcccgccgcgcagccgggcgcgtacggcaatggcgcgcacgagtccctgaccgcgctgctggggtcgtcggactacatgcagcagtcgctgtaccacgcgttcgagcaggccggcgcggacgacgacgacggccggcaggggtacgccttcgaggcagcggcggagtcctcgtcgctcggggcggaggagagcgggtggaggtcgtcgtcggggtaccaagactgcgaggacctgcagagcgtggcttacgcttacctgaaccatcgctcgtaagaactgagaactactactactacaagagagagagagagagatatagatatagacatatctgtcctcaattcctgatcatgttttggactttagcctggggaaatatatgcgcgattttcgatcgatcagtcgatcggtctccgctacaaataatccagaagcatgcatgcatgtgacagaccactgatatataatagatccacacattattgatcatcagtgtagaaattaacgtacgtagcctaattaattggacaaagaaaatggagagcccttgctgtgattatgctgctagttctgtcagtggtggggttgtgttttcttctccaactctctgcctacctgctgcagcagtgtctgcagacgataaggttagattcgtcatgccggccggaaaatgtactccaaggaacatacaaggcagcatattgagagacaggtgattgattcatggccacacgtggaagatccaattagcctactattttcgttgactccttttactggaactctttctgatgggacatgcacacacatcttcagcatatatatagctactatctagtagatgatatgatagagccttttgtcttgcgtagacaatcctactatagtgattaataactctcctatatctggattattaccctatagctacttgattaccacacatgtagatattctaagtcatgaccattacatccttaaaaaaggataattatggtgactcatcataattagtgtggtgtctaataatctgtctattttttcccaggattacatttggtaaaaaccttttttctgaagttttgtttatttgtacacaaattttggttagatgtttccattgcgtagaccaccatcttttaaaccatagatgactgtttcacaaaaaaaagttgactccttttactggaactctttctgatgggacatgcacacatcttcagcatatatgtagctactagtagatgatatgatagagccttttgtcttgtgtagacaatcctaccatagtgattaataactctcctatatctggattattattgccctatagctacttgattaacacacatgtagatattctaaatcatgaccattacatacttaaaaagggataattatggcgactcatcataatta

SEQ ID NO: 542 - protein, 244 aa, Zea mays
MTGFGSPCGACKFLRRKCVRGCVFAPYFCHEQGAAHFAAIHKVFGASNVSKLLAHLPLADRAEAAVTISYEAQARLRDPIYGCVAHIFALQQQVMTLQAQLASLKAQAAQGQQGVHEDAKGYVGSAAAEQLGYGYPWCSGNGGAAAAAAGAVGAPAAQPGAYGNGAHESLTALLGSSDYMQQSLYHAFEQAGADDDDGRQGYAFEAAAESSSLGAEESGWRSSSGYQDCEDLQSVAYAYLNHRS

SEQ ID NO: 543 - DNA, 5022 bp, Zea mays
agcaccacctctaccagcttccaatcaccactagcgattaaccacaggaacactagggaccaaatggatcgaggagattggaacaacaagcagccgactggaacaaccagcagccgataaaagcagagatgagcagagaacctctccaaagccagggatgcgttttcccttcttaagaagacgcccgcacaggtagttacgcagaacccggcggcaaacaaatcgctgatctgttatcagccgccgccagcctgcgctactccttccctactaccgtcctctgccttgcgctcctctctgagccctagccaccttgccagcgcttgcctgccggctgggctgctcggccgtgggcctgatagcggcccagctcgggtggcctccctttttttaataaagtgaaaaacacaaaacggacagcaacttttacttcactttgatttcgcaacggctagccttttctgtttaccttctcctagttgtttttttttctccagccatatcgtagatctgttggtcaatggtcaaggacgccatgccagctttccgtagctggaaaaaggtgggctagtaaaagatttcgtattatacgatgtgattagcttgcgaacggccagtttgtccccgtggagctgatattgcttgctcggggtgcgcgggagtttgacagcgttgtttagacatgacgtgcacttcccaaaactagcataatcgccagtggtcgatgaacgatgaccatggccgatcagctgagagctgactcggcgtcgtccacctggaagcggacgcagcaccgaccccgcagagcagactcccaacccacacatcgagaccacagaccagtggcagcgacccaagccaagcacaaaagtaccgcgcgacaagacggcaagcggacaagttccccggaaatttttttaaaaaagcgtgagaaattcgttaaaaatcctcccggtcggccacttttattaccaccagcagcagcggcaagtcgtcgctcccccctcatcacctccactccaaacaaacaagggacggtgagcgaggaaccccaccccacgtcgccctccccccacctttctctctagtctctagtttctagtctctacccccaggccccagactcctgcctcttctctctctcgcccacccgccccggccccaatgtcgccgcccctcgagccccacgactacatcggcctctccgccgccgccgccgcggcgccgccgacaccgacctcctcctcgtcgtcctcgtcctcgccggcgccccgcctcaccctccgcctcggcctgccgggctccgagtcccccgaccgcgaccgcgaccgggaccgctgcgaggacgtcgccgccgcgctctccctcggcccgctgcctgctacccccaaggcgcccgctgccgtctccgccaagcgcgccttcccggaccccgcccagcgccccggcgctgccaaggctagcgacgacaagcaggcgtcccccgccgccccgccggccgccaagtaagaccccgccgctccgattcgccgcaggcgttacccgcagccggacgccgccgggctgaccgacgcgttgctgtcgatccgtgcagggcgcaggtggtgggatggccgcccgtgcggaactaccggaagaacaccctcgccgcgagcgcctccaggagcaaggcgccggcggcggaggacgccgcgtctgcggcccggcccatgtacgtgaaggtgagcatggatggcgcgccctacctcaggaaggtggacatcaagatgtactccagctacgaggacctctccgtggcgctccagaagatgttcagctgcttcatcgctggtgagtggtgttcggttctacgcttctgtgtgatgcgttcccctcttcctcttgtaattacacaagtgctgcggcgttcactgccatttcttgaagcgtatggattggatccgttgctataagtcctttgcgatgtactggatttactcctaaagcgtaggatgagcttgagtccaataaaagttgctttcttgaatcaaagattcgtaagactcgcaggaagatagcattcatacagcgatgcgttgtgcttgtgcatatatgatcctaaacctaatacaagcactaagcgcaatacagacatacagtcattttgtgcacgtggagaaatttctgctttatcatgccacaataagtgcaatggtccttggctccaccgctcaattttaatcaaagttccatggagctttactaacggatgaataattgggagtttgggacacgctcttgccctaacaaataacgattaatgtgagagcagaaagtaaataccttacaaatcactgaacacattttttttcatagtatgacatttttctcacaagaatatgtatttaccctgtgattttaaaggtcaaagtggcctgcataaatcatcgagcaaagacaggctgactaatggctcgaaggtggatgccctcaaagaccaggagtatgtacttacatatgaggataaggatgcagactggatgcttgtcggtgatcttccctgggagtaagtaccttacaatgtcatatattacttttaatgttgtgagcgtagaatatagttggatgttgtttggttcatctgttgtttttttatcagcagttattaagaagatattacatgattatgaaaagaatatcatatgcattattttcccctttgcgaatgcattacctcattaccttagctcactatctcaatagtgttggatttttgtcaaccagctatggtgacatgcaaataacagaaggatgaaaagaaaaaaaatgtacttgtggcgcaggtattaaacatatttgttatattgttatataattcggtaaactgattaccccgtaagaaaaaaaatgtaaaatgtacttgtggtgcaggtactaaacgcatttgttatataattcggtaaactgattaccccgtataagtttcatatacaattcggtaaactgattaccccgtatcagttttatatctgtacaagttaccactcaagatgcaagtgctgatcttatttgttccttttcagttattttacctctatctgccggaagctcaaaatcatgaggggctctgatgctgttggaataggtatgtaccatgtgtaacaatagatctagaaattctgcatctattctgtgcatatgttacagcctcacaggatatgaatttattaattcccaagcactaatatttgctgttaacttatactatacagagggtatgtttctcattgtttgcataaggttgtcttgcctgcgctttgtaaataagttaggcaaagtattgaagcattagctgcaactctatcctggctgtgaacggattgtagcttacatgcatagaccatttctcgtgactgataacagaacacaaacctaagggaatgataagatgactaaaatattggttggaagaaacagttgctgttttgctgctcgaatctgaaacttgattttggaaggtgcctttccttgttgtgtgcaactaagacccacagactatcgcattggatcctttattttgaaatttggtgcactgtttaatttagctataatatttattgtatgattctgaaccatgtccatctgcgtgcagctccaagaaccatagagcagacaggtcagaacaaataagcttggtctttgcctgcacccacgcaagaaatctgagctagctggaaggccatgttgaaggcttaaatagttgctcggaattatcaaaagtcgtcaaatgttagtgtagtttccacgtgttcttgagacgtgtgtatttgtatgtctgtgatgtgatccgtcagatctgttcttgtgcccttcaaaggccaaatcagggagctctctgcttcctgtgtatgcttgctttttccagtattccctgttattctactatgaaatcatccatcgtgccacaaagaactgatggttcctgatgtcaagaaagctgtccgaattgtcttctttttacaggagaaattggtgctgcactcagcttcctgccagattaaccttagtactaacagtgcattttacacagaactgggggtctctgggatctctgggctcctgttctgcttcctccggactccggagcatcaaaacgggcactgctgtcactgaagaaattgtagaatcggctgttcctgggaactctgggctcgtactgttctgctttctccccagcatcgggagggtccttgctgtcagtgaagatttcccctgtcgtcgtggccgcgtcaacgctctcgccgtcggccttctggatggaaacggttttgaaaatttccggtattctaaaaaccgattttttgtttttttttttcagaaacaaaattgattttcagaaatttctatcgaaatcggtatctataccccaatccaacttaatacatgtggattaaggtgaataagacattagacatgaatagatatcgaagcaatataagtctcaactgtggttatgggccatggcgtttcagaatagatgctgaatttgttgagacagtgaaaacgaaagcatgctagagtggttgcaaatttattaataaaaatgtttcttaaaattccaggtgtgaattataagcggtgtaagcacacatttgaatcggtaatatttcatatgacaagagaagctcaccgtcatctcgaaagttaccgtaaagaagagggctgatggtgacagacttcaaaaagactagttaagaagggaaaaaaactgatttgttgaagttcactcgagcgacgaggaagagaaaacttcgcttccagggcgatcagataagggtgtcgcttcagggatgcccgagagccttgcaacggctcgtgagtttattagatctttggaagagggcgaagtggtgacataccttcgcaagatcttggtgtctcgcagaagggcgaggatatggcttcgcagtaaagtgaaatgtttgttgagagttgagactgatgctggtgtgggatgtgcaagcaatccacttgttgaagctg

SEQ ID NO: 544 - protein, 249 aa, Zea mays
MSPPLEPHDYIGLSAAAAAAPPTPTSSSSSSSSPAPRLTLRLGLPGSESPDRDRDRDRCEDVAAALSLGPLPATPKAPAAVSAKRAFPDPAQRPGAAKASDDKQASPAAPPAAKAQVVGWPPVRNYRKNTLAASASRSKAPAAEDAASAARPMYVKVSMDGAPYLRKVDIKMYSSYEDLSVALQKMFSCFIAGQSGLHKSSSKDRLTNGSKVDALKDQEYVLTYEDKDADWMLVGDLPWDYGDMQITEG

SEQ ID NO: 545 - DNA, 3028 bp, Zea mays
cccctgccggcctgccggccgcgcccttgtcacgcagacacggggcgcgggcgcggattatgccgcgagcccgcgacatcgacgtgccgacgtgccttgccgcggcgaccctggcatctgcggcggctgtagtctttccgtgcgcgcacgcaacgccaacgcatggcataacacatgcacgcgttgcacccctctcacagcatgaggaccaggaccataagctgctgcgtgcgctgccattatgagccgcaatcctcgcatgcatgccattgtgccacagcatggttccttgatacagacaaaagggtaaagatttgccccggacgccggaccctgtgtgtgtccctacaatcaggtatctagagtggtcctcagagttgcagttcttcaatctctctttctcttcttttttttttcttcttctgtgtgtgtagggggtgtcagttcttctttctgtagctgtgttcagcgtaatggacgtagctgctttaagttaagcgtgtgcgttacgggtgtgctttgttgagtactgcatcattagctaggtgatgatagtcattctggatccttcattagtcaccatggatccttcttgatcatgtaaacctaaaaagttgtatgtaacaatataatcatacctgtgagtgcttccaagatatgtttatgttgataatatgatgttcgtttttagttgtattaacatattaggctttcaaaagaaaaaggttttgcaagtgtactttgaccaccacttccatttacaaaaatatatcgttaattgctacaaaatcaatatcatgttaaaatacttttggagtattcttctattcgtataagctttacaaaactaactgtccacattagctgactggctattggtcaaagtttatcgaatttggctttcattgaaacccctaaatataatactagtatgcgcgcgtatacctactaaaactgatcaggggcagtacttgatagctacttatatgctagttcgcgtcagagcttacgtgcgtcacactcgttcattccctctgacccatgacatgactctttgagtggtggtgggtaactaggttctcacaatgcaatgttgtctgcagctcaaggacatggtgctcaagttctccggctccagcaagcagtgcagagggacgcccggggcccagtcgttcaggagcagcggcgggggcaggtacctccgcccctaccccagcttcatcgacgtcaccggcttcgcgccggcgaacaaggttctcggcaacgcattggcaggtgcaggcgccgccggtggtgcggcgcgaaccgcgtcgtcggatacgttggacctgaccaggagcaaccgcaaaaccccccagagtagcggatggattccgagcaccgaggcggcggcggccggggacgatgtcagggagtggacggcgcaggtggagcctggcgtccagatcaccttcggcaccatcccgagcggcggcaacgacctcaagcgtatccgcttcaggtgtgtcgtcgttacgcggccactactgcttcccctgctcaacgactcactgcgacgaccattgattcttgcaactgaactgactcctaagtgcatggtcgtatctcgtatatgctacgtacgtcgtcgtagtcgggagatgttcaacaagtgggaggcgcagcggtggtggggcgagaactacgaccgcatcgtggagctgtacaacgtggtgacgttcagcggccggcagcaagggtgctccactccggcgtcctccgtcgacgactccgcgctggtgggtatcgctacaggacactgcatgcattgcatcgtccatcgtttcgacgacccgctttaaaaattaacccgacaaagtgttggaatgcacgcacgcacgacgcagagggactcgtcctactcccgtgtcggctcggcgagcaggggcagcccgatcacagtgccgccgccaccggtggcaagcaaagaacggctcgcccggagcgcgtcgttcagggcaacggcggcagggtcctcctcggcaccgtacgcggccgcgcattccgccagggcggcatacttcccgtccgcggccgtgcccgacccgtcggaccacgtgtgggcgcaccacttcaacatgctcaactctgcggcggccggcacgtccgcgatgggcggcgggggcccgtcgccgtacgacccgtcgtcggttgccaccgcgtcgtcccgggacgaggcttccgtgtccctcagcaacgcgagcgacctggaggccacggagtgggtcgaggaggacgagccaggcgtgtgcctcaccatccgcgagctcggcgacggcacccgcgagctccgccgcatccggttcaggtatggcactgatcagtccttcttgatcacacggttcatgccatgcatgcctgatgcctgttccatgtttctgtggtgttgcagccgggagaggttcggcgaggagagggcgaaggtgtggtgggagcagaacagagagagaatacaagcggagtatctgtagcaagcgatcagacaagcgctgatgcaattttcaggcctgacgggataatcaaatttatttgggagggggatagattagggagatgatgataccgcgctatatacatggcgaaaagaatgtgaagggtgaaactgttgaaagtgtaagaaatgggatggtacctgtctttagtcacctaataataaactaacaataaggttgtacattgttggtgccgtgtctggtttaaagttgctttgcgatgcacatctcggttccttcgttggtttaatttgttttaaaactatgtccatttcttgcaggtttacgtgagtagtatagaacagatgttgtgcatgaaaaatatcataatgctggcaaactggggtggagtttgtagtgcaggaatggtcaggtctagactctagacaacaatcgggataagttgagatggagcaaaggaatgcgtatagtttttttgtacatatatttagatatataaatatataagtaaaaaccataaagcaaattagctaaac

SEQ ID NO: 546 - protein, 90 aa, Zea mays
MLSAAQGHGAQVLRLQQAVQRDARGPVVQEQRRGQVPPPLPQLHRRHRLRAGEQGSRQRIGRCRRRRWCGANRVVGYVGPDQEQPQNPPE

SEQ ID NO: 547 - DNA, 15315 bp, Zea mays
taccgacacaacctccacaagttcaaacaaacaaacataattaagtagttagtattgtacaacttagggagatgcagaaacgaatttaacttaaaagttccctgccaacctttactctaattgtgacgaaggaagattttggatagtaaagatgcataccctttcaaaaagaaagtcatttttttatccggagcataacctaaatagcagacaaagaaaagggaaagaatgactaatgaagtggaagcaaaaagatcattgggaagatgctagcaatttctgacgagcattcacatggcaaagttttaaaatgaacatattaaggaaataacgcatagaattcaatttgcatatataaaataacatcttgaagtaattcaaattgcacaaaatatacatatgaaacctcaattagaaaaatgagattgaactttgagcctaacctcatgtttaagatcaacacatcttttcgcatacactcgactcgagtcgcaaacgtgaaatcaagctgacatgatgtaaaaagaaaggagagaatgacttaatagccatagagggctggtctgggtgccccccgccctgctcgcgagtcgcgaccgtctcgatgggcgttactaggcacaatgacggtgcaggcatcacggttgggcgagcgagacgggactaaagctttagcccgtagatcgtattaatggctgtgtaaaatattatttgatagtctagtgtttataaagtgaagtttaaaataatagccggggacgagccactagagattggagtcagccttaacaaaaacttatatttttttctgtttatttctatcggtaaagactgaagaagttctcccagacatactcaacttaggaccagtagccacaacgcctcgcaccagcgaccgccgacccatcgccacgggccggttccggttccaccgcaagtctcccactccagtgtcgtcggtaaaaccgtaacgtccacacgacggcgagtagtactactagtgtacgcggaaaatgatttgactgttctctattccctcgccctctcttctcccagacggccagacgacgccaccgtcacgccccaccaccaccaacctatcccccaccgcgtcacgcgcctccacctccccagatcggcggcgaaccggggggcccggacaggcggcggagagctcgaggcgtcatggcgaagtcgagcgcggacgacgccgagctgcggcgcgcgtgcgccgcggccgtggcggcgtcaggcgcgcgcggggaggaggtggccttctccatccgcgtcgccaagggccgcggcatcttcgagaagctcggcaggctcgccaagccccgtgtcctcgctctcaccggtcagcgccccccttctccctcctcgccccactcacgtctccgcttcgatttgctgcgctagtgctacgctgcgctgcgagcgaggggtgggctgctgagcaccaagttgggttgcttggagcggatttggcgcctaagaggattgtgccgggttcattggtgatgtcccgcttcattgccacttgcacgactcttgctcggacggtcgtgatctgggccgcttggatccccacgaagccaagtcttgctcgctatgctcttattcacacttgccgctggcttgagaagatccgtgttgcttatctcatgctgctacctggaaaagtagcccgcattcactacacctggatccacttttcatagtttaagcacacaacttggctatttacctcacaaagctctagcaagataatgcgaacccaaacttacacattgctggactataacaactaaggagcagaaaagatgagcaatcgtcaactgccaaatttgatgtgctggacctctttataggtccttctgaagttagcagctggagctaccacagttagccagaggggatgatttacagttccactttacacactggaatggcgttgttatgagagagctcagaatatgaggctatgagcccataactggtggattcgaggattgcaacaacagtgatttctttgttcagatatttgttgcattcacatattcatatgagtagatccctagcttagccataatttgttttggatgaaagaagcagtgatctatatgcagttgtcattcacttgattgtttgaagataaatggagcctaaccatgtagtacccgagtctaattggaggagttggctcttgaagatgatccttgattatgcattcatgcttcagtcattatgtctgcccaatacgtgatttgctttattttggatttattaccgtggccagtgtcagtttgctgttttttctgttcagtaattcagtaaatatcttgggtggcatatgataggcatctattagtaaatatctcactatgttattggaagcatagggtaggaactgtgttatatagaagatatatgcttgcaacatctgctgaacaattttagcttcacgcagttaaacaatcatcaagaggcgaggcgaacaaagcttttcttcgagtattaaaatattcatctggggcagtgctcgaggtttgttttcaatactgacaactttgctatctaatagttgtccatcacaggaatggggtaatcttgtttggcgccttaagctttcatgagggtatacatgctgttgttgaaagatgaaacactgggtcactgtgcattttcattgcatacatgattacatatactattatctttcttctgtttcctatcactcatgattgattgcattgcatgaacactacctcaagctagcattgcgtattgtaatactcctgcatcaataaaatactgtactaatttttccccctctggcttttggtgatggttgttgcttactttgctgcgagaaacttagtcttctcctgttctttttcttctatttcagccagccaaactttacaagctgaaacatctaacaaaggttgaggttatttccaatgatcccagtggttgtacatttgttctggtatgtactttgatctctttcgcaatgcttctggtggagtatctgaagagaacatcggttatatccattactaactctttatgttttatgtccggactgcagggatttgataaccttaggagtcagagtgttgccccaccacaatggacgatgcgtaacattgatgacaggttgttgcccagaaagtttgctgtgtggtattagactctgctagagtgctaattttatccaacttcttgtctcttgtgctttaaatctcattctttgctatatattttgcagaaatcgtctacttttttgtattctgaatatgtgcaaggagatactcagttatcttccaaaagttgttggaattgatattgtggagctagctctttgggcaaaggtgtatatcaaaattttccattcgttgtgattgcgagcttgcctttttgcgccctctctctctcattgtttctaataaatagaatatctatgttccacatagtgatttcttggaactaatttgacacaaattgcctatctatggtatttttgcgccctttctctcattgtttctaataaatagaatatctatgttccacatagtaatataccatgatttttcatccaaaacccaacccgacccaacatgttcaactgggaggtacggtccaacccaacccaacacgttcaaccgggaggtacggtccaacccaacccgacactagacatgagtcgggcatgggccgtgtcaaacaacccatgacccgaccttgactcatcccgaactcgaccgacgtttgaacatgtctactccaaatcggtttattagactgtctccagtaggttctctaaagcctcctctaccgtaaattttatgaaagatttccatccttcatgtctccagcaatgtcctctaaatattcctctaaatatagaggatgttgctgaatcctctcgctatatagtttctctctcctctcctctattcgttttaatatataaaacaacatatttagcaaaactaaaatatgtacaagtacaatacatttgagagtattacaaatacgtacgtacaaaagttaaaagtaaaatatgtctctaatataggtatttacgtatagagaacgagatatagggaacgttattggagtaacactcccacttacgttgagtctcttttgggtctcagacgtgaaatatgagtgagctataattattttattttaattgcacttaccaggattcgacttgagacctctggctctgatattatattaagttccatgcaccaatcagtccaattaatatggtatcagagcttggactggttgatgcatgcaacttaatatgatatcagagccagagtagtcgagttcgaatcctgtttagcgaaattaaaataaaatagttattgttcgctcctatttcacgtttgagatccaaaagggactcgacatgagtgagtgttggaatataatataagtaaattgctcacctcttcctattataccttgtacaacagttcactcacatggtcaatcgaaacactgttttgcactgtagactgcattgttagcagagtggagtttgaatatgggtatgtagatgagtaagctgctggagatagccttagcttaaacctttgggttgaattgattggtgacatgcaatttaataaaaactagtctcacaatgtcatattttttttattttgtttaaataaattgtaatagatactgctgaccgaagttatgttttgaagacctggtcactggccaaacttatttttattcaaggaatacaagttaaagaaaatagagaagatacagagttacagtttgcgcttcacaaatcctacataataaaaggagggagtactatatcaattttcttgtttctgcaatgcctagctcatttttagtttacaccttaaacattaaagcctgatatctctactgatatttcattttttgggcaacatttcacatcgatttggtgctcactaatttgatctccaaattttcaccaaaatgatggtttggcttgatatgccccttgatggttgttgtctggatatttttctaatgaacctgaatcctttttaggaaaacacactgaccatagataatcaagtgagtacccaagatggtcaagaaacatcagttgctactcaaaccgagaggaaagtaacagtaactgttgaaaatgatctcgtgtcccaagcaaaagaggaggaagaagacatggaggcacttcttgacacgtaaatatcttatcttacatagatttgcccctgattattgcaaaaaatacaaccaaaactgcatacaacaactattgctgtcttttagggcttgttcgtttgtgccggattggtgggtcggaacgattcctaaccggattgcttctttaatttatataaactttgattaggtggaacgattccgggtgcaatccgacacaaacgaacaaggtcttagtttttttagctgtacacctatattattctagtagttcattttgtagtttttgaactttttatctgccattttttataatacaaggagttcatccctaattctgttgagattaaacctagccgtgatcttttttcccatgttaacacaagttgaaacatcaggggatgcagttgctcatgtgccctattgactcgacctcatggtgtgacaaccgatagaaggaccatactaaactcatacaaaatcttactgcccaaagatccctttgcctttccaatgtaccacgtgtaattagtttgcatatcacttgcatctgaccttactattgctgaaatgctttcagtactttggtaccactacaatcttactagcgtaaagccgtaaataatgcaggtatgttatgggaataggtgaagcagatgcattctctgagagattgaagcaggagcttgtggctttggaggctgcaaatgtatatcaattactggaaagcgagcctttaatagaagaggtattgcttctatgttcctttgcaatgcaatattgacttttgtgcactaattatgatatagtacagcatctgactgccattactcatctcacttttattctggagtgaatgttttgttttttggtatggaagcttattcattgactgatctagttgcttggattttcaggtcttgcagggtctggatgctgctagtgcaactgtagatgatatggatgagtggctacggattttcaatctgaagctgaggcacatgagagaagatattgcatcggtatgtttgaggagttttttagctgtctgatttgaagcggatatatatttcttctctagtttatttgttttactgttagaagcatagctatgaaaagttgaaaacagagactaccagtttgacatgaaaagccaggattagtgattggccctatctggtatatggagtttactgataagtggaaatcagtgggatatagatgttaattgaaaatattcctctgcgcctctgtagatcaaaccccattatttgccattcaaaacccaaaggatcttagcacccgtatgctgaatacacatgcatccagaattatagcccttctgacctgattgtctgactcttctgacgacatatctgtctggcttttggggtttcagaaaaacttaagaaaaagacaacctatcaagctgagtaatactgacaacctgtactagtttggtagttgtaactagcacctgagctacaaggtctgttgaatcaactcaatactcacttggaatctgaaggtcctgaattcttgcttgcttgttatcatcggtttcagaattttggtagaatccttcctttggcatcagcctggcctcttggacttgtcattttgaaaaattaaatattgtgcctgtttttgtggtccactggtcctgctgcagtcatttgttagcagaagacacaattttctagatgctgataagaaagaacttcactaattggtcccctactatctaattttgcagattgaatcacgtaacaatggcttggagatgcagtctgtaaataacaaagggcttatggaagagctagataaattgcttgagcgtctgcggattccacaggaggtatgatggagaggaataatattcatctccctaaattgatgtctaatatttatttatttatttatttatttttgcttatatccaattcagtttgcagcatcattaactggaggctcatttgaagagtcacggatgctgaaaaatgttgaggcatgtgaatggttgacaggggccattcgcagtcttgaagttcctaatttggacccatgctatgtcaacatgcgcgctgtgagctacctttttcttgttttctgctacaatttacaatttaatagtgcatggaattgatcatgctaacattgcagaattgttaatattatagagttgtgacactgtgaacgttgaataacattacaaaattgttaagacttgttttgtaagagtgtgttcgtgttagcgaggtgggtatgttgtaatttttttggtttctccttaatgcaatgatacacagctctcatgcatatttaacaaaaaatcttttgtaaagtccacctgtattggttaaggaacaaattttaagaatcactatgcttcatatgctttgggtgtcaccatttcctcaataagccctatttaagtttttctttgtagtagcttaaagttgagaactgtgcatctctgataaattacttctgtgtaacatcttgtcaggttagagagaaaaaggcagagctggagaaactgaaaacaacttttgttcgacgagcatcagagtttttgcggaactacttctccagtttggtagacttcatgatcagtgacaaaagctacttttcacaggtttcttcatagcttcatttttgaaagtaaatatttcctttcccatttgagatgaccgacagagttcacttttaactgaaagcagcgtggacaattgaagcggcctgatcatgcagaccttaggtataaatgcaggacatatgcccgacttctgcagcacttaaaggtaataattgacttaattttgccaaggggtctgcctagatattacatatttacttcattgacacatttgacatgtatcatttcttgttgctaattactgcagagtctggacaagagctgcttaggtcccttaaggaaggcatactgtcattcccttaatttactactacgacgagaggttagatatggataatggaatgctttttttaatttgattccatacagttcactttttgtttatctaatttcaaatatgttcattttgttttaatctcacatttaacaatttatctttttgtttgtttgttttgagtcctctgcttaatggacagttactttacaatccatttgccttctttatttgattttaaaggattcacaattttgaagtttactgtttgatttggttcaggcacgcgaatttgccaatgaacttcgtgcaagtacaaaagcaccgaagaatcctgctgtttggcttgaaggttctggcggctctggtcataatggaagcagttctgatacttcacaggtctcagatgcatactcaaagatgcttacaatatttatcccgcttcttgtggacgaggttgctcctttcctttcattaaatgtagctacatgactacctttgtttttatttgatagacaaactaatagctattacctttgcagagttccttttttgcacattttatgtgctttgaagtacctgcacttgttccagctggttctcctaatgctaataagagcaaatccggaggaaatgacccggatgatgatctgggtcttatggatccagatggcaacgatctgaaacctggtaccttttcttgtactcactaatatgtgttcgtggatgtaatgttaatgctctatttcttattttttttatgtgttgctatcctgtttacagacagtacctctgctgaactgggtacattgaatgaagctcttcaagaattactcgatggaatccaggtatatttcgtgatatagaacactgcaaccctgactcgtccatactgacggaaagaagagtaaaaaataattttttttgataggacaaacatgaagtacttctgatttaagtcaattgtgcattcttctgttttttcatgtgcacattattgtgcagtattgcagttgccaacttccttcagtgactgaaatgttttcccccttgtattccaggaagacttctatgcggtcgtagattgggcttataaaattgaccccttgcgttgcatctcaatgcatgggattacagagcgttacctttctggacagaaagctgatgctgcaggatttgttcgcaaactacttgatgacttggaatcaagaatatcagtacagttcagccgggttagttcccttgttgagcctaagctgctcggtgtgactattcattacgggctgattttctgtccactgcttgttcagatctttatttcttctctcttttcagtttattgatgaagcatgccatcaaattgagcgtaacgaaagaaatgtgcggcaaactggaattctagcctacattccaaggtatttgcactggatggattagcactgtgatttatttgtaattccagtctttagtgctactccctctgtcccaatatactagtcgttttaggcctatattttttatccatattcaaattgatgacaatgaacctagacacttatataaaactcatatatcaaatattttatgaatctattaagaccctaaaacgaatactattttgggacggaggaagtacaatttaagactaccccctgttctttttataaggcttattgggattcggagatttttttctagtgtactttctactttgacagtcaatttctcatacaatacctcattaattactataaaaccagcgtcacattttgttgatataaatgtcataaattaagcacacatatcatttgactagttgctagttggaatttatgatgtttgacattttcaaatcctaatataccttgtataaacaaatggagggagtactcttatgttatgagcggcagatggctgcgagggttagagggcgatggctagggtttgagggcgacaactagggttatcggcgctgtggaggtcggccgcagggctttgcccacggctggcaagagagaagggatttccttctaatctcttgcttaccttcaattgatacaatccctctccttatatagagagggttacttgaccctaagcactaaatctaatcttatcccaaactagtctatctttatctaaacaacctgaggggcgtgctacagagccgctgttactgcagcggcactgtagcaggccctcttgggccctgacacttatgtatattctgacacagaaatggtgattaaacattccattgcatgttagctcaccttttgtgtattgtcatattaaatcctaattcgtgcatcctgcattactccctccgttctagtatataagacataaccgctttttattctaatcccataatataaggtgtgctctctctgcatatacgtacatcgatatagtagtattagtgttgataaagagaattaaatatatttcttggtctttgaactagaagtgggtacgtcttatgtactaggacagagggagtattatttgttaacattttaatttaattgcacttagacaaagaataaaactcacataatagctcataatattcataggaacatacatgttaaaacattctcattggtactttgcagaaccttgtttacatgtggtaacacattgcctgcatcattatattccctgtgaaaacaatatagaataaatttgacatgacccagcaggttctcacatatgttttgcctatgctcagctcttacccaaaaatgtaaaaactggcaataagcagcaagactccggtgctcttatccttggcactggtgattatatgatttaagttctgcttcaagataaaaagagcactatggagaaattgtgcttattgcagggtgtactgtgacaagtttttttgttgtcttagagattcttttctgaagtggcaaacatagaccaagatctgactgtttgtttcatatagatttgctgtccttgcatcacgtatggaacaatatatccaaggacaatccagggatttaattgataaagcatacacaaagctagtgagtttcattcccttgcaatcttgcacttgtttgcattcttggtatacatattttgccgatttagttcataaatttgtgttagtacttagtagtactgtacatgggcatatgacatgtggtatactttgggttgtttcattgtttgcttgcctatcaacacttgtagactccatgactttataggtgccattgaaaggtgtctttcgttaatagattaccttctaaaaaatatacacaaatatttgcaaatttcttccattgcactaaatagtgtatagtagttttttgtatcctaagttctacttctatccaatgggactgtaatttagtgttagaatcccggttttggggtaagccccttgtaattacattcttactcctatgtaatgggccaggcccaacaaccttggtctattaatacaactcccaaacctgagttagggttagggtttcccacatggtattaggctaggtaatttttttccaccccagtcgccgactgtcatctctccctatttccacctccaaccgccgcgggtgccctccagtacctgacctttttcaagcccgacatcgcctacgctgtccagcaggtgtgcctacacatgcacaccccgtgggagcctcatctcaccgctctcaagaggatcctgcgctacctccgcggctgcctcgactacaaccttctactctgactctccccgacgtcggagctcgtggtctacaccgacgctgactgggctggctgtcccgacacgcgtcggaccacttccggttattgacgtgttcctgggcgccaacctcgtctcctgctctagcgcagaggtcgagtacaatgctgtgaccaacggtgtggcagaggtctcttggctacaccagcttctccaggagcttcacagccctcttcagcgcgccaccctcgtctactgcgacaacatcagcgcggtctacctctgcaccaatcccgtgcaacatcagcgcatgaagcacgttgagattgaccagcgtgtcgctgccggtgatgttcgggttctcagtgtccccaccacgcagcagtttgccggcaacctcactaaggagctatcgtcgagtgtattcgccgattttcgatccagtctcaacatctgtacaggatagagttgagactgggggtgttagaaccccgtttaggtttttgggcttaaccccatgtaattacattcttacccctgtgtaatgggctaggcccaataaccttggcctactaatacaactcccaaccctgagttagggtttcccacatttagattttagagatacatggcataatgttgccaatagtcagtttagagtcaaggaagatttcgtcctaagattttgcattattgtaagatttctatcttacttggtagaaaattgtattaccgattttttttgtaagttgggcactttttttatttttcaccatatggctaaaccacatttcgtatcatggaataggttagcacaatgttcgcaactttggagaaaattgcacagagtgatcctaaaactgctgatattgtgttgattgagaattatgctgctttccagaacaggttatgtttcttcatctttccttaacttgggcttgtcctatttgttgagcatatgatctttcacttatatacatccttgccttttcatccttcatgcataggtgggtctacaaaactaacaatatattatgtttgatgcagtctttatgacttggctaatgttgtgccaacgcttgcaaagttctaccatcaagccagtgaatcatatgaactagcttgcactcgccatatcagctcactcatttatctggtatgtaaacttattcaaattttcttgtgggatattgtctgtctctgacagatctaagatttcttttggacctttggcagcaatttgagaggttatttcaattcaaccggaaagttgacgaattgacttacactattgctgctgaggaggtgagctaactttattatactccctccgtcaaatggatgataatgaatgtaaacatatacaaaacacatacatcaagtattgtatgaatccaccaattctctaaaaaaaaatttattttgggacagagaaagtatgatatatatatacttcggaagtgacaataaatgagctttgaatattcatttttttattaagccgtctaatttttattgtcaaaatttttcagataccgtttcagctgggattatcaaaaactgacctaaggagggtactgaaatccagcttatctggggtaagtaaatctatatctgcttcatgaatcagttgtacttcagagctttttacagagttgggtggcagttgtcacttcttgccctaagctgtgacctgtgagcatatttccatgtggggttgcagactaactactgtcttgtattttcaaataaatcacatcaatttaatgcccaattattttgtttgatcaagaggctcgttcatcccacggtgtcaccatgagaactgacacagtgtaaaactgtgcagattgataagtcaattagcgccatgtacaggaggttgcaaaagacactgacctccgacgagttgtttccttcgctgtgggacaagtgcaaggttagccactcgaccatcctattattatgaatgtttggttcactattgcccccaggagtcattgcttgagacgttccacttaagctgattgcttaatctgctcaaacacttgcagaaggagtttttggacaaatacgagagctttgttcagatggtaacacggatatatgggaatgagccgatcatgtcagtcaacgaaatgaaagacgtccttgctggtttttagatacaagtacacagcaccatgtatgatttcagagaaatagctatgtattccattcattccattgaattctgcacccacttgcgttactgtgttaggcgccctttttgggttatgtgtgtgtatgtggatgtcctctgtatagaagtgaacgcggcatgcttcccctaatgatgttcctgtgtcgcatcgagccgtcagtgacaatgcaaactgcaaacccggagtaccggaaggaacatgttcatgtttatgacgtcatttgtccaattgccgttccattcacggtcaagaaggtcatgtcttgccaagttcgctttgtttcctggtctgaggtctcattgctactttcggttgttcagctgaagactgaagtgcaagctatcacgtgtcgggctccagttcgttagtgtggccccatatgttgcgggcttcccagcttagaaacatgagcatctcaggtgtcgaaacacaaacatagaaataaaggggtggcgtttgagagaaaaaaaaagtgtgaggcaagaagagcgtgatgcagctcaacagtgcttgaaagtaatcagagggtccgtgctcttgctgaagcacgagcctcatgattgtaagagtcattcttttactatcactgctgcatcagggtcgctctacctcctcgcaagtatttactatcaattatatattttaaaaaaccaaatgaacaaacaaaccgaaatttcaggcaacaccccctatttcagattgtgcaagcataatgaaacagatcaccaaaagaattcatagaaaaagaagggagagggattcaagatcctagaggattggtgcatctcaaatcgaatcgagaggaacaaggtcgcaacgcaaagaaaggcgcaagcagagatgagcagaccggagggaaaaacaggagacgaatgctggcggcggacgcgaatgctgactggactgccatggcttcctgaaaagctctgttgttgatttatagcacgagcctagggttaggagcatccccggaatttacgtttctgcccacccatgtggtgcgcgtggcctgagttttctgctcggtgagattttttttttagaatggagatccatctgggctacccccattcggcagtggcgacagctttatcagtgctgctgctgcacccattcgcgacatggactttggcccattcttttttcacatatactaatcatccgttctaaactataacatttttttgtctttttacgtatattagtctatgataatcttttactttttacactattaatcaat

SEQ ID NO: 548 - protein, 889 aa, Zea mays
MAKSSADDAELRRACAAAVAASGARGEEVAFSIRVAKGRGIFEKLGRLAKPRVLALTVKQSSRGEANKAFLRVLKYSSGAVLEPAKLYKLKHLTKVEVISNDPSGCTFVLGFDNLRSQSVAPPQWTMRNIDDRNRLLFCILNMCKEILSYLPKVVGIDIVELALWAKENTLTIDNQVSTQDGQETSVATQTERKVTVTVENDLVSQAKEEEEDMEALLDTYVMGIGEADAFSERLKQELVALEAANVYQLLESEPLIEEVLQGLDAASATVDDMDEWLRIFNLKLRHMREDIASIESRNNGLEMQSVNNKGLMEELDKLLERLRIPQEFAASLTGGSFEESRMLKNVEACEWLTGAIRSLEVPNLDPCYVNMRAVREKKAELEKLKTTFVRRASEFLRNYFSSLVDFMISDKSYFSQRGQLKRPDHADLRYKCRTYARLLQHLKSLDKSCLGPLRKAYCHSLNLLLRREAREFANELRASTKAPKNPAVWLEGSGGSGHNGSSSDTSQVSDAYSKMLTIFIPLLVDESSFFAHFMCFEVPALVPAGSPNANKSKSGGNDPDDDLGLMDPDGNDLKPDSTSAELGTLNEALQELLDGIQEDFYAVVDWAYKIDPLRCISMHGITERYLSGQKADAAGFVRKLLDDLESRISVQFSRFIDEACHQIERNERNVRQTGILAYIPRFAVLASRMEQYIQGQSRDLIDKAYTKLVSTMFATLEKIAQSDPKTADIVLIENYAAFQNSLYDLANVVPTLAKFYHQASESYELACTRHISSLIYLQFERLFQFNRKVDELTYTIAAEEIPFQLGLSKTDLRRVLKSSLSGIDKSISAMYRRLQKTLTSDELFPSLWDKCKKEFLDKYESFVQMVTRIYGNEPIMSVNEMKDVLAGF

SEQ ID NO: 549 - DNA, 4611 bp, Zea mays
aatggatagttaaaggtgtacctaatagttagctggactattagatggggacatgtggtgtctagatgtctgtaactaaaagtagctaatagctaaactattagctgtgtggtttggatgtaccctctctctcggactataaaagggagagggtgtcctactttggttccttctcggatctcccttttagactcctcttttatcacttagtcatttccaagcaatactaaaccatccacaaagtggatatagatgtagggtattacgctctggcgcggcccaaaacctcgctacatcgttgttctgtggtagtgtccacgttctcgctgtattctctccctagttattcggacaaggccaaactgtccattggtattaatatcacggtgatgcctaacccatgctgaacataaacagaagatatttcccctcttaccgtcaaccggtaaccctaccgaacctaaacaggggtatttcttcgtatccatgactgtcaaatgacgatgggcagagacattctggatctctggaattaattattttcaatggcaaagacagacacttaaaataacaatttctagagttattttctaagacttatttctcaccggtgaaaataagaaagtaatgttaactttttgatgtcgaactttagacggtaagatgccttagaaaatgacactaacgccgcgaaaaataagtattttttacgtccactaaccgtaaaaatgcctattttcctatagtgataaagccttagctaattgatagttacgtttctccaaatcaaactttcatttttcagaacccgttggaaatgcacgcgctgcgctaagagcaaattaggacaagcaatcgcgtcatatgccaagtgcagtgtatatatataacaaaccttagcatggacagaaaataaaaattgcaccgaaaaggggacagattccattgcacacctaagcaaggtagccccttggatctccctataaatgcgcaggcagcaatcccattagagtgtggaagcagcacgcaacactgtctcctcccctcttctacctcgacccatcacctttgcatagcatatatagcgcagcagctcactgcaggcagacgaaacaccatctcttcacatcacatcagagcagagcagagcagagcatcacccgatcccgatcccgctattcccagcctgcagtagcagcagcagtcgcgccgccctgcccatcgatccatctggctatcatacctgtcgacatggaaggcggactgagcccggagcggcacgcggcggctgagccggtgcggtcgcggtggacgcccaagccggagcagatactcatcctcgagtccatcttcaacagcggcatggtgaacccgcccaaggacgagacggtccgcatccgcaagctgctggagcgcttcggcgccgtgggcgacgccaacgtcttctactggttccagaaccgccgctcccgctcccgccggcgccagcgccagctgcaggcgcaggcggcggcggcggcggcggcctcctcgtcctcgtcgggatcgccccccacgagcggcctcgcgccgggacacgcgacggcttcgtcgacggcggggatgttcgcgcacggcgccacctacggctcgtctgcgtccgcgtcctggccgccgccgccgtcgtgcgaggggatgatgggcgacctggactacggcggcggcgacgacctgttcgccatctcgcggcagatgggctacgccagcggcggtggctccggctccgcgtcctcggcggccatcgcacaccacgagcagcagcagcagcagctttactactcgccgtgccagccaggtgagcgcgccaaaagccacgccacgctatgcatgcatgcatgcttcgtgctctcgatccatggatgcatgggtccatcgtccatgcttggttttcgtccagtttaatctgtgctcttaatcaagaacttgggtttcgaattcagggaaattagaccctttcactgctagccctcctataaagatcatacccatactggcatgcaaaggcaaaagatccatgcataatttgctatgcatgctgtgcagcagaggtcgatcgagtctcgattggtgctacctagctgttatcttcgggtagttagcgacaagcatatcatgccaatgcgaagaactagatcctgctgggtattagatcaatcacatctaccacaggaacttaactggaggaacagttgagttcttatgatggacggtgggtgttcatttttcgtttgaccgggagctatcgtccaccgccgtatctgctaattcagacaagacagctcgctgcatcactactcaattgtgttgtgcttaattatgtagcatcatcagtagtagtagtataatacaaatactatctagtaccttaacacatgccggccgcatgagtgcttgcatgcgatatgcagctggacctgcaagcaaatactaacatgttttgctcatgcatgctgtgatattaagagtaatggggacccagttccagtattctaatttctagtacacatgctgcacgcatgatcagaagataacatagcaatataattgggcagacagacatcgtccaattaagttaacaagacgtacggtgtgttgtatgatatatgcatgcagcagcgagcatgacggtgttcatcaatggcgtggcgacggaggtgccgcgggggccgatcgacctgcggtccatgttcgggcaggacgtgatgctggtgcactccaccgccggcctcctccccgtcaacgagtacggcgtgctcacgcagagcctgcagatgggcgagagctacttcctggtcagtatctctctctctctctaagatttggccacacgatttaattaactaggtacaatgatttacctgaatgatgatgaacgatagacgacgatcgacatcccatatgcaagcagcaagcatctgggcctataaacacaagcatattatatatataacatgcattaacatggtagctgcatatatatatatatatatatatatatatatatatatatatatatatatatatatatatatatatatatatatatatatatatatatatatatatatatatgtagtagtagctgacgactgatccaaccgtcttgttgttttgttcccctaatgttggacaggtcacgaggggctactaggtagctagctatagcacattgcattgccgacatggagaccccagagctagctgcagtacacgtactcctccttaccatgcatggaattggatgttatttggatcgtcggagacgcatgcatgctgcagtacctagtatctctgtgtacgtgttcttcagtgaatgtctgtcagctcttgccgtccgtccgtccggtgtagatcagaaaaaggaggcaaagaattcgataccagcagtgtgtgtgtgtttactatatagagagagacagacagacacacacaaacaaatagagtgtacctacgacgcatccacatcgaacatctatactaagtatgtatgtaatgatcaatcatatgatgagtcgcaccattgcacgcatttgctttaatgaacctgaatgcaatgcatgttgcaacttgctgctgctgcgtggtgtgctcgggtcaagtcacatcaggcattatccatccatccatcgggctggcatcggacggcgtgtcgagcgcactcggccgcaagtggcgacctcaccgcccgcgccggccaaatggaggccaccgcgtgtctccttccgagacctctatctctgccgaccgaccgaccgcccgcccgcccgccagcttcagcaatcagcaatcagctagaagcagacaacactcaacagagcgagcagcagctacccaccctcttcattcttcaccgtactgtagttgccatagacagacatcagttcaagcacaagtgatcaatctcttatacttctctgggatgaaggaaacagtccgattacgaccaattcgttctaggtgtgtgtgtgttaagagacgacatactcccccagtcaagtcagtttaccaacgacccatttggaggctggagctgtgctggatcggtggcagcagagcactagctgtaaccctaaaagctgggcgccgcatgacccagcacacacttcaattctctgcacccggtcacctgtcacatctgcaaagagagggtactgaaccacgaagctagcaagctttacgaccaagctgatggtacaaaggcaggcagcacgacgacaataataaaggcgcaggcaggggggcaggcattccagctaatcgcagcgcagaagtgtagattagagtagagtggagtagtctctccttaaaaaggctaccgaagcattcgctgttagtacagtatagaagaaaaaacagaggctctgtactcatttcacttttgagggggggctgtttgatcggtgacctctgcctgccagacagcgattctggtagctctgtctgaaacgacgtcccggaacgaggaacacggccaccttccaagctgaattcttcagtcccaatcactcgtttcagcctacggctacgggtgagaatacacagaagcccagtaacacgaacaagagacggaga

SEQ ID NO: 550 - protein, 259 aa, Zea mays
MEGGLSPERHAAAEPVRSRWTPKPEQILILESIFNSGMVNPPKDETVRIRKLLERFGAVGDANVFYWFQNRRSRSRRRQRQLQAQAAAAAAASSSSSGSPPTSGLAPGHATASSTAGMFAHGATYGSSASASWPPPPSCEGMMGDLDYGGGDDLFAISRQMGYASGGGSGSASSAAIAHHEQQQQQLYYSPCQPAASMTVFINGVATEVPRGPIDLRSMFGQDVMLVHSTAGLLPVNEYGVLTQSLQMGESYFLVTRGY

SEQ ID NO: 551 - DNA, 2828 bp, Zea mays
acgataaaactacatgcgtcagtactaaccgtccttttgggcgttttgtgaagcagaggcagcagagtttcagaaattctgctgccatgttcctcagtccttcaaaggtgcaactgctatatactatagaaagaagaaaacagtacatcttaagctataacaaattcagttctattataaacacataatttaagctacgaattggcagaccattgcttgatttgtttttctcggtggctggacttacatgcctacataaaaaaacaaaaggaatatatatatatagtttactgataatcaaaccaaaggggagatgctgacacaagaactagttctttcctatcactggataccatgtgctaaactttatggtgctaaagtttaacataccttgaggagttaaactgttattggatgttaaagtttttcacttcacttttaacattcatgtttggatcttaagtactaaaagtataatgctaaactttagcatacttaagaaactaaactggtattgggtactaaagtgctaaaaggtcataaaatgaaatgctagactttagcacagtgtatcaaataggtccttagtctcccaaaacaaaaagagagagagagagagataaggaaatagtactcctgctaggcttattgtagtagggtgccccatgcggtgcagggagggtgtcaccaaaaaaaaacttagcggtaaggagcgagggcgattggaagctcaaaataatggagctggttgtccaccgggcagacacgcctggtttgtttaatcctttggccctaatcccccagccctgctgccgtctccttctcctccttataagcattgccgccccgcccccatcctccaccgcaccacagccgcagtcagcagggcaagaacacgaagtgatcgtcgccaccgatcgatccagctcgagctgagcgagctatcacgtgcagcacagtgcagtacagaacagctgtgcttgcagtcttgcagatggagatgacggggttcgggtcaccgtgcggagcgtgcaagttcctgcggcgcaggtgcgcgcgcggctgcgtcttcgcgccctacttctgcgacgagcagggcgcggcgcacttcgccgccatccacaaggtgttcggcgccagcaacgcgtccaagctgctcgcgcacctgccgctcgccgaccgcccggaggccgccgccaccatctcctacgaggcgcaggcgaggctgcgcgaccccacctacggctgcgtcgcccacatcttcgcgctccagcagcaggtgcactacggctgcgtgcacgaagtgcctggcggctgccgccgccgccgtctccgctttgtctctcgtgacggggtttaatttgctgatgacccgtgccgccgtgcaccccgattccgatggatccaggtgatggccctgcagacgcagctggcgtcgctcacggtcacggcgcaggggcagcagcgcgtgcacgacgtcgacgacgccaagggctacgtgggcaccgccgccgcggggcagctagggtgcagcagcaatggaagcgtcgcgccggccacgtacggcaatgtcgggcacgagtccctgaccgcgctgctgaggtcggagtcggactacttgcagcagtcgccgtgccacgcgttcgagcacgccggcgcggacgacaaggacgacgacggccggcaggggaacaccttcgacttcgaggcagcggccgactcctcgtcgttcggggcggaggagagcgggtggaggtcgttgtcagggtaccgagactgcgaggacctgcagagcgtggcttatgcttacctgaaccatctctcttaaaagagctgagaactacttactcgtagtgccggaaatgtatcacaagagatcagagagagagatcatgttttggacttgagcttgggatgtgtgcgattttcgatcggtctccgctagaaacaattcagaaggtagcatgcatgtgacagcccgttgatatactctcgccgttcttttatttatttatttatttatttatttatttatttatttatcacattttagtttaaaaataaactaacaaatattcaataacagagatagcacatgttggtcaatgtagaaacgtaacctaattaatcggatagaagaagaagagttattgctatagttacgctgctagttctgtaagtttggagttgtgttgccttctccggttctctttcttctgtaagagacagctgactgattcatggccacaccaggttggtgattttggatatgcttcggacctaggaaatcatgcagagtacagtggagctcccaaggaggatgttaggaatagggttggcaatggggcgggttcgggtcgggtccctgcggttttagacccggcggtgttcggggcgggtttaaatttttacccgcgtgtccacgggttcggggcccgatttaattcggtttcgaggcagttctacattttcaaccgtggtttttttgcggggacccgaaacccctattaaaccgagtcagcccactaacacaagcaactgaactcattgaaactagccaggcccagcccaacatggatgcaaagggagaaattgcaaaggcaaaaactccttgggattttgtaccagcagtgtacagaatagggaaacctgcacctcttttttgggtccccgacgggttgcgggcctccacgggttcgggttcgggtccgtgttttcacccgtagcacatttcgggttcgggtcgggtctgtaattcgggtttcaggtgcgggtccgcgaacagtgcacccgacccgaacccgccccattgccaaccctagttagga

SEQ ID NO: 552 - protein, 232 aa, Zea mays
MTGFGSPCGACKFLRRRCARGCVFAPYFCDEQGAAHFAAIHKVFGASNASKLLAHLPLADRPEAAATISYEAQARLRDPTYGCVAHIFALQQQVMALQTQLASLTVTAQGQQRVHDVDDAKGYVGTAAAGQLGCSSNGSVAPATYGNVGHESLTALLRSESDYLQQSPCHAFEHAGADDKDDDGRQGNTFDFEAAADSSSFGAEESGWRSLSGYRDCEDLQSVAYAYLNHLS

SEQ ID NO: 553 - DNA, 3762 bp, Zea mays
gatgcctaggcggtatccagcaacagagtgtctctagcacgcatctcttactctatttatcaactctcccccgaatacatgtggttccttattgtcactggcggatctacagggtgtcaccctgtagtccggtaccggcataacatattagctttgtctatttcatgacttcaaacatgttgcaacaacctacagatgcgttcagtctatctatatacaagaggaagaatacaagtgacaaatctaatttgtgaatataagaattattatgctggtttacatagaataccaaattatagcacacatttatcattccttattgaatttctaaatgtatttcactgaattattcatgcatttttaatttggcataccttatagtaaaattctataaccgctactgcttattgtcattatgcgacttggaagacattttctacctactgaaagcggtctgttttttgtgttgtcgagagtgtgatgggtaaccatagttaataatgcactggatctatcactactcatacaggtcccatatgcctaataatgttgtgaagaccaactcatctgaccacatctgtccctaccatgcttgtacaccacactacatacatcactcatcactggtccttcgtttcggtaccctcctcccacaatgttcaatgtatatactaatagttctcaaataaattcctgtggatgttacaaaaacccacggtctttggtttcctgaagaagtatttcatggaggcgcgcacgtccatcgtactgcgtcctgcagctatggccgcccccatctggccaataaatgtactaggtcacttgtagccaatagcgtttcaacatgcacacagcttttcccccaatagtgcaggtccttgtattctcctccctctccctcacctcaaatctcatccacacgaacaggcggcacggcagtattcctccacagccctcctctctataagatggcacagccctctcaggtaggggcgagtgtctcactctcacatagtaaaaaaaaaaaacgccccaaggttcttaagcacaattctctagctatcttggtctcctacacagcctatgcacatgagcccatgcctctcctctccttgcgcctgcatagagaggtggtatgatcacctggaaagtttttaactctctctctctctctctctctctctctctctcttacaagcctagaccttatgcatggtcggacggacacatctgatcataggacatatgagtaggccacactcctcctgcccctctctcgtagagatcaacacacactgctcttagtgccaggacctagagaggggagcgtggagagggcatcagggggccttggagtcccatcagtaaagcacatgtttcctttctgtgattcctcaagccccatggacttaccgctttaccaacaactgcagctaagcccgtcttccccaaagacggaccaatccagcagcttctactgctacccatgctcccctcccttcgccgccgccgacgccagctttcccctcagctaccagatcggtagtgccgcggccgccgacgccacccctccacaagccgtgatcaactcgccggacctgccggtgcaggcgctgatggaccacgcgccggcgccggctacagagctgggcgcctgcgccagtggtgcagaaggatccggcgccagcctcgacagggcggctgccgcggcgaggaaagaccggcacagcaagatatgcaccgccggcgggatgagggaccgccggatgcggctctcccttgacgtcgcgcgcaaattcttcgcgctgcaggacatgcttggcttcgacaaggcaagcaagacggtacagtggctcctcaacacgtccaagtccgccatccaggagatcatggccgacgacgcgtcttcggagtgcgtggaggacggctccagcagcctctccgtcgacggcaagcacaacccggcagagcagctgggaggaggaggagatcagaagcccaagggtaattgccgcggcgaggggaagaagccggccaaggcaagtaaagcggcggccaccccgaagccgccaagaaaatcggccaataacgcacaccaggtccccgacaaggagacgagggcgaaagcgagggagagggcgagggagcggaccaaggagaagcaccggatgcgctgggtaaagcttgcttcagcaattgacgtggaggcggcggctgcctcggggccgagcgacaggccgagctcgaacaatttgagccaccactcatcgttgtccatgaacatgccgtgtgctgccgctgaattggaggagagggagaggtgttcatcagctctcagcaatagatcagcaggtaggatgcaagaaatcacaggggcgagcgacgtggtcctgggctttggcaacggaggaggaggatacggcgacggcggcggcaactactactgccaagagcaatgggaactcggtggagtcgtctttcagcagaactcacgcttctactgaacactacgggcgcactaggtactagaactactctttcgacttacatctatctcctttccctcaacgtgagcttctcaataatttgctgtcttaatctatgcgtgtgtttctctttctagacttcgtaattggctgtgtgacgatgaactaagtttggtcatcgcatgatgatgtattatagctagctagcatgcactgtggcgttgattcaataatggaattaatcggtgtcgtcgatttggtgatttccgaactgaatctctgtgatgaacgagatcaaacagtatccgccggtgacggacgttcattactattggcaagcaaagcaagtactaatgtaattcagctgtttgatgacagaatgaaaaaaatgttgaaggctgaagctataacatgctgaaagagaggcttttgctaggtaaaagtctagctcacaaggtcaattccatgatgccgtttgtatgcatgttaaaatctgcacctaatggcgcggctttatatagtcttataattcatggatcaaacatgccgatcatttagttgggttaaaagttcctgttactaatggtttatctaattgcttctattaacactaatttcttgatgagctgcaaatctgattcgttccttttcagactactgtatatctcgaattatctatccctaggttgacatcatttctcgtctgctggatgatgcctcatatatatatttctatgtgataataatcctggctaaaaaaactatattctgattgttttctgatttcatttttcgtcggtagaaaagatatttttagattctatcggcacatatccacagattccaaaggtctgcatgattattttatttcgtatagactatgaattgctacttgctatttgattggccatcgtgattcatgcacaacttactatctgactctctttaattaattaaacctttagagtgtatgttgaaagctaattttatttacgaccacctccatctcaaaataaatcaatttatagagctgtacaaagtaaagctattttaagtttgaccaaatttataaaaataacacaaatatttatggccctaaactattatcatcatttaggtattaactctatgcataatgtacttagtgtgatcgttgatgatttttaatataaataaaattggtaaaacttaagatagttttggggatgtagggccggggtgctagggtttctcataggcacatcaaatgtcgtccatgagttcaaatatggacgat

SEQ ID NO: 554 - protein, 376 aa, Zea mays
MFPFCDSSSPMDLPLYQQLQLSPSSPKTDQSSSFYCYPCSPPFAAADASFPLSYQIGSAAAADATPPQAVINSPDLPVQALMDHAPAPATELGACASGAEGSGASLDRAAAAARKDRHSKICTAGGMRDRRMRLSLDVARKFFALQDMLGFDKASKTVQWLLNTSKSAIQEIMADDASSECVEDGSSSLSVDGKHNPAEQLGGGGDQKPKGNCRGEGKKPAKASKAAATPKPPRKSANNAHQVPDKETRAKARERARERTKEKHRMRWVKLASAIDVEAAAASGPSDRPSSNNLSHHSSLSMNMPCAAAELEERERCSSALSNRSAGRMQEITGASDVVLGFGNGGGGYGDGGGNYYCQEQWELGGVVFQQNSRFY

SEQ ID NO: 555 - DNA, 9744 bp, Zea mays
aataggggaattttccgcggggaattggggatcgagtccccattgtcatctctactctgcgcacgtctggatggtcgcgcctggggcccgaacggttcacgatggcgcagagggtcttatttttcacagcagacctagatcttgcctctcgggagggatcccgtcggggaggagagatcctagggtgtgtcttggtgtcagcaggccacccaagacgcttctaatcgatgtagaaccgaagaaatgcgaagatttaaggtagaggaaggctaaactagagctactcctaatacaaaatgtaaaaacgataagtaaatttgatctgatcgaatgtgggggttcaatcggccgtagccctttatatatataaatgagagatctgaacccgttacatgtcgtttaccgagttaatctcgtagatttagctaacaaatcccacaagaaaatcgaaatcctaaccgattctacacacaagcggaccatccatgccatcaccgcggatcatccggcctagcgtcccctgcccaaaagtgggctcaacaagcctaaatacatataatttataccacgtgcaacacatttattcatccatatcacatgtcatgcaaggcataagcatcatgttaacttagttatactgacatacatttatgagttgagatgtccaggatgtgagcgcatgagcccattgtccattcaggaccaagacaggctactaagcactttctacataacttgtatgtgctaactatagcatgcttatatggctctctccaaagttcaaagctagctcaaatcttttgatttaataaaacttaaatttgtttgatttcagataaactgataatttttataatatttagagtgagttgaaaacagaaactggccgcaaatccacctcaagccttttgatttgacctaaaaaaaagaagcccccacaaacaccactccacactagtgcactgtctctctccaaaggcagctgcattggcctccagccttttccctactgtgccgcgcgccctcccttctctctaatgatagcatagggagagaaggcatactccgaggcatccttctcctttccctctccttccccaaacccttttcctctttccctcgccccaagaacttcatctcatctccaggcgccccttttgcgcttgcgcaggaggagctcacggggacagtgggcggagagctcgatcgctgcaccactacttcactggaggtccgcccactcccatggaggagatcacccaacactttggagttggcgcaagcagccacggccatggccacggccagcaccaccatcatcaccaccaccaccacccgtgggcatcctccctcagcgccgtcgtagcgccgctgccgccgcaaccgccaagcgcaggcctgccgctgaccctgaacacggtggcggccactgggaacagcggcggtagcggcaacccggtgctgcagcttgccaacggtggcggcctcctcgacgcatgcgtcaaggcgaaggagccctcgtcgtcgtctccctacgcaggcgacgtcgaggccatcaaggccaagatcatctcgcacccacactactactcgctcctcactgcctacctcgagtgcaacaaggcaagcaagactagtagccgcagtctaacaatagctctcctgcttccggttcagctactgctgctagcgaagtttggccacatctgatgtcaagagcatggcgcatgcacatactttctgcttgcttttacatagcatactatagtttatgcatgctgctcatgtagacatgtgcatctggtgttcggaactttctcaaacggccgtgggtgtttgcaggtgggggcaccaccggaggtgtcggcgaggctgacggagatagcgcaggaggtggaggcgcggcagcgcacggcgctcggcggcctggccgctgcgacggagccggagctggaccagttcatggtgaggcatctttaggtttatttcacgcgcgcgcagcgcaccattattagtcgttttcagctcgggctcggatttaatttgcgtgtatatatggtaggaggcgtaccacgagatgctggtgaagttcagggaggagctgacgaggccgctgcaggaggcgatggagttcatgcgaagggtggagtcgcagctgaactcgctttccatctccggaaggtcgctgcgcaacatcctttcatctggtactgaagttgctgcggcccatgcccctcttattttatattagatgatttcttggatcggttgtcgcctcatgcagcgatgcatgccctccctcttgttaaaatcttcctgtcctctccttcgtcttgctgtcctctttcttggttgagcatatgttgatgggtttttttttttgcatttcaaaagggttaaatttttccttgatgtggtttctcagcaattaattttggcatctgtgtagttccctttttaagagcatcttgctatgcatgcatattttgagtatagatagctgcggaacgcagatgaatgtcttgtctgcgcttcatgttttttaatgcgcggcagcattcctaatcaggggtttcgaaagagaatcttctccctgcttgcttttcctggccatgcatctgtgagattcttctctctggcttccgtcgatctttgcttctgctggaaaggaaatagtcctcagtcacacatgtgcaggagcgcagcttcaatctagcatggctgaaagctctctggttctttccatacactccatcctgcacattccttgcatatattctgctgttaaactgcttagcgacgaggatgaatgaaaacacctgtcttttttactagtgggagtactaatttggctgctgttgccatggatgcgttgttcatcgtcctccattatattgatcgattccatttggaatggaacatgtgcatgtgttctgcgagtagttcctggctcagcgcagccatcttttcccatgatgggaaccccagggagttcccttgttctagggtttgggaaagggccacagtgtactgggtgctgtggcattgtgcaagcacagtctatagccgaggagtctcactggcgtatgtcagtgaaacatagtagtatacacgttgtagtagtgggagatcagagagagagagagatggggagtcatcccccatctgtcacgcaagcttgtggccagaacattcttgtcatctttctccccctcaagagatgtagctacctgttgtcctagaatctatagtgttgtggtgtggtcttccaggtgcgcacacagatctggccactgctggccttagtatttgctaattttaaaatgaacacatcaggtagatcgagacgatccatggcaagcgtctttctaatgacctatcacaaggctatagtaacaactcgtaccaccacagttacgcacagcccagagtttttcacttctcggttctgttcttcttagagcactggctatggctagtatatatgcatggcagcaacacacacacacacacacaatcacttcattactggagcaagttagcgaagaagctgccatctgatgtcgtagaatgctgcaaaaatgaaaggttcagaggcaggcatacgggttgaaatggagcaccgtatgcggcggcccagttttttgtgttctgaccggcgcagtggacaaaatggcctgtgtgcctcgagaaccatagagacagttgcctagcgcatgagcgctgagcggcccctattatttgatgtgagatctctctatcaatggatgtgtgatctgctaggtttatattatatatgcgtctactatatccctaccagtccctgtattttctgacagatagacttctcccccgcgcgttctctcataaataaatgacggtcaaggaacattggatgctttccgaggcgagctagtacaagtttcatctgcgtttgcgtttgtatttttcagctgtcaactcagatttctcctcagctccaactgttctttgaccttcttggtactgttttcttggaagaaactatttgttgaccatttttggttataataaggccacagacaaactgttgaatttaatcacaaaacaacactactgcgttttttcttttcttttctgactgatgttgcacatgtactccaagattcttggttgcatgcactctttcaaggtcatgcaaaagcagggacaccgggtgtcacgagtttccgtttgtctcgaggtaagaccaaaaaagataccggaagcaaacaacataaaacaaagggtaggatggaaaagagctgatggattttacaatgtatcgccagagtggaaaagacaacgcgactagaggaaaggaacgatctggcacttccaactgtgtgaattcttccatttgatgtgcgtctcgtgcatgtttattttcttggttactggaaatcgggtgcatccatttttattcaggattcaattattggttactggagccaggtccgttcgtttttattttccttttgagattgactggatcgattctctggttctagtcacttatgctgttggttttatcgttttcatggatttctattctatctctcccaatattcagtatcacataaaatcctgtgactagatttctttatcacatacaatcttgtttttttattttctttaatttaacactggatttgtttgataatatgttctgaaaaacgttaataaatttaagcacaacagccttttaaaaatatgtataattatttaccttgaaacccagcatcggccgggaacaaggaaaagaactcaaggttttaaatgcattgaaatgaaacattaatggagtgtttggtttgaataatgatgtagtccatcatcttctcactcctcacttttttgtttggtttatggaatggagtgagttaatccatcaacacctcattcctcatagttagttgtttagtactaatatgtggaatgaagtcatcccaccaaatttgaagaatggactcatgatgcaccacttcattttagatagagtgattcatcaaaccaaacacctcataagggcatgtttggatcctaggagctaaaagaaaagtgactaaagtttagtcactttaggagctaaagatctactaaataggaaactaaaagtgactagaatagtaaaaggtatctttttagtcatttttagctcctaagaaggagctaaattttagttagtttggtttagctcttggatccaaacaggccctaagaaaatgtttcgacaacatttgggacaataaaacagttcctaaggatttctttggcaagattaggccttctttggaacaaagaaaaatgaaggaatcttgaaggattgaaatcctataggaagctttcatatgcaaagaattgtgttcctaggatgatttctaacaagaggctcatccccttgaaaattgttctttgtgtctatctctctcctctaattcatgtgttcttatgttgcattgaaacactattagaaaattttcatgtgttttaatttatgtatgattgtaagtgtcaagcagcactattcctacattttttctattcctgtgttttatcgatactgcatcccaatgaaggcctaagcgtatcatgcaatcttttccagaagttttttagattgctgtataatgacaaggtgcaatgctcttcgttttcttttttggttttcctcattttcagcaaggccaccaaatttttccatgatgttcttgtcttattcctgtagtatccctcgaaaaaatttcatagctttctacatccatgttatctaatgatgttcttcatttcaaagacagacacatttggcataagttctgattggtcactaaaactttgtggtacggtcatttacttttactatacacatgtactgtattcatgcgtacattgtactttgtccattggggcctttcctctttttaatacaacgggcatcgtttcaaaaaaaatgtgtcagtcgtaactgcacacttctttagttttccccagttaacagcatgacggaatagagttacagagtctcatgtcaagtcacatatatcctcaagtcgtttctaaaattaaagtaatattttcattgttgcttccgtaagaatgcaccacaaacacaaaatatcatttcctttatgcaaatatatatatatgaatgtttgtttctggcagtggtgagaagcttctcactgagccaaaggttttagggatgccatgtgctctttttcttttttaagtgtagattaagcaaacctttataatttttaaactccaaccagataccttttctaaattcataaatgctctggactatcttcacgaaaaaggctttggtaatatgttcacaagcctcctttatctgttatcctgggctagacataggatgtgttgaagcaatacaagcggagttgtttcgttaaagcaaaaaaaaaactgtaactttatattggagaatatacatcgttctcccatatttgttacagtgctcataaatagacaaagttttttttttgaaatcttaagccctgtgtttctttggttatcttatctctatattgcttccaaatatgttgtcatcaagatggatatagataattgtcaaaacgaaaagtgtgcatggttcatttatgccaattctgaaaagcataagttaaatattaagataccaataaagaaaaacatatgcagtgttgactgttgggaaaagaacaaggtctgcacatacacttgcaatataaatctttttacccagcaataaaaaaacgatcaaatatcacgcaaacaaagtaatacgtccagaaacacccatacttttgaaattcgtctttgaaatgcagtaggttcacaaaataaaatggtgcaactgcacatgtcctttatatctgtactcaatgggttttctggagatgttagattgattggtgggacaatatcctaatgcaactcgcaaattcccaaggccgaactcaagtgggagtttggatgattttttttgtaaagaagcagatggctgcgctagtttacatagaccatcacacttcacaattcacattcatgaagtcataactttgttcacttcttgtttaactatggcatataaaaacatactgtgtgttgttttgcttgtatggaacatgtattttagttttttagtaaataagttcagtaaatgtctttgccggacaaatttcaccaatctggctacgaatgatgcttgatcacttcttttgttttatctaaaagttccatgtcttatgcttgaaggctcttctgaggaggatcaagaaggtagcggaggagagaccgagctccctgaagttgatgcacatggtgtggaccaagagctgaagcaccatctcctgaagaaatacagtggctatctaagctcgctcaagcaagaactgtcaaagaagaagaagaaagggaagctccccaaggaggctcgccagcagctccttagctggtgggatcagcactacaaatggccttacccctcagtacgtcttctttttattcttccattttaactattgttggtgacacatgatttagacgatgccaattcttcatgaacttttcatagccagctacccaatgttagtactgactgcacattgtaattcaagggtaagtatatatatacataaatcacatttggcaaatctaagctacatatgggtctttgatcttccatgacggtctgttgatctctgatttgcatatcggcatataaaaagtgagccaaaatatgtcagagtctaataatattgatcagggagtggcaggtgattattggtattaatttaaccttatttaaggtattttgaaacttctgtagcgttcttactaaataccattgattttaatttaagcaactatatatttatctggtgaaaaatgaagccttttctgatatacaaattgaagagtctacaatggtttcacttacatggctgaaacagaaaatcatagtgccctgaattgtgtgttgatactcataagcgcagattcaaatttgtaattttcaagtttagggttctaagtgaaaaaaaaacattgagtccaggagcatacactgaactttttttttatcatatcttcattttgttggatgttttgtatacggcatatagcctgtgcttccctactggatatgaattaaccaactcttcccatcggtgagcaggagactcagaaggtggcactggctgagtctaccgggcttgacctgaagcagatcaacaactggttcatcaaccagcggaagcggcactggaagccatccgaggagatgcaccacctgatgatggacgggtaccacaccaccaatgccttctacatggacggccacttcatcaacgacggcgggctgtaccggctcggctagccaccggtatctcgcttccatttcacaccccacggcctagctataaagactaatggttccaggtgtctgaagtactgaagacaggggggctagctatctaatgtttgtgccgcacgcatgagctgtaaggaggccatgcttaattattctgttgccgttgctactctatctatatgcgcctatgcctccgtgcatgaactatgctttaggtggttgctgctccacactgtggtggtgtgcttttgcttttgtgtggtcgtattgtatgcgtaacctgacagatggatccctgattgctacatgtttgaataatttgcatgatctagctagtttctgcctaatctaatggtacggctcatgtcttgtcaggtggatttgttatgtgttttttttttcaaattgaggcttgtttgttttgctctcaatccatccatgtgaattgggtggaattaaatgagtttaaattccaaagtcagtcaaaatctgttataattcttccaatccataaccgaagatcataggccctgtttggaatccctagaactaatagttagctagctaatatattattagtcggtatgagccggctctaataaactaattgttatttgtgagataactaacaattactaatagttagctagctaatatattattagctggtttgagccagctctaatacactaattgttatttgtgagataactaacaattaattatgatattagctgatgatgtttggaacctaacaactaatttttaattttatttctataggttctaaacaggaccttagtggctagtttggatacactaaagtgtcgttcggttgtttgagatcgatggatcgaaacgattactaatcagattacttctctaatttatataaactttgattagctaaaataatttcgggcgcaatctggtacaaacgaacaagccctaatcaggatggcatgccaatttggattggtgtggggtcacgcatggtgaattatgaatcatcctgggattgtttggatgcgtgtgtatttacatcaatagtttggcgtggatttgaaatttcacttgtcgtccacctcagacatcaggagaactcgagtgaatagggagattaatatttgggtaactaggcgagacgagccaacgagtccactaccaatgtacttttcaaaaaaaaaactacgaagggtgagtaccattctgcacgcaccagcacgccagcaccagcatctactcgacaaggagacgagacgaggctgggtttgcaggagaggctttacgagtttacgcgatcgggagcggtgccgcagtccggccggccggccaggaggggaagtgaaagt

SEQ ID NO: 556 - protein, 359 aa, Zea mays
MEEITQHFGVGASSHGHGHGQHHHHHHHHHPWASSLSAVVAPLPPQPPSAGLPLTLNTVAATGNSGGSGNPVLQLANGGGLLDACVKAKEPSSSSPYAGDVEAIKAKIISHPHYYSLLTAYLECNKVGAPPEVSARLTEIAQEVEARQRTALGGLAAATEPELDQFMEAYHEMLVKFREELTRPLQEAMEFMRRVESQLNSLSISGRSLRNILSSGSSEEDQEGSGGETELPEVDAHGVDQELKHHLLKKYSGYLSSLKQELSKKKKKGKLPKEARQQLLSWWDQHYKWPYPSETQKVALAESTGLDLKQINNWFINQRKRHWKPSEEMHHLMMDGYHTTNAFYMDGHFINDGGLYRLG

SEQ ID NO: 557 - DNA, 5660 bp, Zea mays
tcgtaggtacggtcgacctccatccgcgaactccttgtcatctgtgccgtacctatgtgcgcgcgtgatgggatcgtcagagacagctgttgtgcacggaattattaaggcctcgtttatttgtccaggattgcccccaacaatcatttaaactgatcagagtttacactccgttcggatgtagatattagagcacaaaattaggaattgagattaactttctaaactctgttgtttgatggaattcagatttagaatcagagacctaattttctgaaattggactataactagaaagttactctcacaacagagagcgtcaccctccactgtattacttgaaatttgaccgcacaattcggaatagctctatccatttttataggtgaagcggcaatgttgactttcttatcgtactgttatatctttatcctaggcagttgatgagatggccttctatgtgctcttctcataccccagctagaacacatgtcttgtttaggttatcattcgtcttgctgagcttttcgataatggtataaccgtttagaaattttacaggtactggagtattatggtggctagatttgaagttcaataagtgactgattagcatgacaaatttagaggtgtccgaaagatttaactctttacacgatggaatatataactagcactgttaagttgatatacatagatcactacaaatttggtttatgacttagactattaaaaaatccgtttaaattttattctaaaagatcagagtaaacaaatatcttaaacatcaacagccgtaccacgaggaaggaaaccgagcgagcaagcagcataggcgcgtagccgcgtggaacagtaggaattgcacgagaaaagaggagcttggtggtgcgggactgcggggtgcggtagtggcggccgagctgttggtgcctgagacgtggaggagggagccgagtgggagtgggattgcgtgtgccacgctggtgaggggacgagaggagggaggaaagggacggcagcacagcacacaggcgcacacgcgcgcacactgcaccagacacgccaaaagcgttattttaagggcggcgccaccactattgtcgcctgcttcaccctccctgctcactgccgcctaccctcgttgaagcgcgctctctcgctctcgctctcctcgcgcttcctcccactcccactggacagagaggagggttagtggagggcggggtaggaagctaccgccgccacagtaacagcgttagctaggggggaagcacggaagcgggaagcaatggcgaccggcggcggcagcagcaggagcgacgacgtgcgcgggctcaagtttggcaagaagatctacttcgagcaggacggcgggagcgggagcggggcgggggcggtgggcggcaggaaggggaagggcgtggccaccggtggcgcgaggccggcgtccgccgcctccgcagcccagccgccgaggtgccaggtggacgggtgcggcgtggatctgagcgccgtcaagcagtactactgccggcacaaggtgtgcaacatgcactccaaggagccgcgcgtcttcgtcgccggcatcgagcagcgcttctgccaacagtgcagcaggtaaaaaaaaaatttcgaaccagcagtcattcaccttcggttgctctcagcagtactagcaccccaaattgggttccgaaaaattgcgcattccagtggaccaccctgcttcggcggcctactattcggctcgtgataccttgggaactacagtgtcgtctcgtcagtagctagctgaattcgtgaccacatgttcgcacactactgctatcttcatcccactcgcttcaacttagaaacaacgatttctgacgatttccaagcatccaactactgtatcttttaaaacatgcttgcaggcgagttcacgaattctaacatagcgtagcatccgtccataaatagttggatgctatgctgggagtaccgttggtggtgggcgtcaaaattgatgtaaacttcgggcaagtggaatctgaccagaatagtaagggacatagatgtgagcattcacagtatcttgtctgagcagcacggatatagcaagcctagatttatctcttttttttctctttattctactataggtagcctatgtgaacgcctattggccagtgcagtactacgcctgtgcctgtacggcactatttaccgaccttaaatgagatggagcaggagttggatatgaagcaaacagggttggaacaaaacaaacatagtggaaaacggaatgtggtgatgctgaaaaatgcatatggtccatgtttgcaagctgataacgtcgcctttttttttctaattaagaatctgcatcaagtgttgtatagtgtaaggttgcacgggcataccatagcatagtcctaaaatgccgttgcttcgttgcattatcttgatgaactgtttggaggggtcggggtagggttagggtggggtgggggagggcgtgcaggagccatactcacattgtctctagccttcggcatcaccggtaaagggaaggttcgggccgttcgttgatagatatataaattaaaggcctgtttggtttgtgactaactatgtctcactttatttaaggttaatctgtctcactttgtttaaggttaatcgttcgaattgaagaactaatcttagatagaaaagttagataaagcgtggcaaattaggtagcaaaccaaacatgccttaaacctcttgtttcattgataaacacgtcactttacaaaggctctacgcgtgtccgctccccgtgaatgattgcaggtgctcttcccacatggtaacctttcaaacctttttccatgcatatggggccctgatgtgtggatctaatcatgaaagctgttgtgtctttggttaatatcgctatacacatacatgtactttgaataaaactgttagttcaggaggattaggaaaggaaaaaaaaaacacatacacgctgctgcttgtatggacgcacgcggcttttcacatgacatctgtgtttgatattgtatatttgttcatctgaggcaagttggtattaagatataagctaacagtatagcagggtcttgattaccgagttaacaattccctctttccatgtgctatagaagtataatagtttttctacattgctgttgatccatggatattcctttagtctgttttttttttgttttgtaaaactaattgtcctgtgcaaatctcagtgctgattatagattacaactggtgacatgactcgttttttcgttatcagtggtctgatttatagatgctactatttgttttcccaacattgtttttgggttgtgaatgcacgagccgttgacctactactattggtcgtctttgaccctgctttgattagcgaattcactcgttgagtctgtactgtgagtgaaaaacctgttccctctaatcacaggttccaccagctacatgaatttgaccaagggaaacgtagctgccgccgccgcctcatcggtcacaacgagcgccggaggaagccaccacctggacctctcacttcacgatatggccggctcgctgcatcacttcaaggtatccagtgctgcaccttgttagtagctgtacaccgatgccatgctccatcgttactaacccgccgtttctcggccaatctactgtttcctcagagcctggcaggttcagaagcttcctgctcgacttctcgtacccaagggttccaagcagcgtgagggatgcgtggccaggaatccagcacggtggcgacaggatgctgggcaccgtccagtggcatgggcaccaagaacctcctcacccacaccgcagtgcagctgctggctatggcaaccatgctgcatacaactgccatggcggcttggtagcaggcggggccccaatgctctcctctgccgcctttgagctcccgcctggcggatgtgtcgcgggagttgccgccgactccagctgtgctctctctcttctgtcaactcagccatgggacacgacctcccacgaccaccggtccccagcaatgcccgcggccggcgccttcgacggcaccccggtggcgccgtccgtcatggcgagcagctacgcggcgtcgagcgcctggacgggctcgcgggaccccgctgccgacggcgccaggaacgcgcagcgtctcgacgatgctctgcacctggtccacccaggctccgcggcggtccacttctccggcgagctcgagctcgccctgcagggaagcggcgggccgccacacctgccgcgcgtcgaccatggcggctccggcggcggcaccttcaaccattccaccaccagcgcgatgaactggtccctgtagcagcactgcctgccttcatccggtcgccacgccacgagatgtggagggagcacttttgcattggacaccaccctggttttgtgcgccttaccttgccgttctcgttttttcagggtggagaaactgggattcctaaccatagtagatctaccgtgaattcccttcccgtgtagtagcgcattgcgtccatgaactcatttgatcgatcgtcgtgtcaccgtgtgcgtaactgcgtatctgtttggcgtaactgcgtatctgtttgttgaatctttccgaacattgcggacttcccatgctgcttcaagcaacaactcgggctataaatatatcgtactactggagaacctcggcgagctggtacggccgcgatgagttcggcagacaagacgcatggttcgcacggcgcgtggtctgtcatcgacgaggcgttcatgaaggctccgccgtcggacgacccggcttgctccgtgcaggtggacgctgtcgcataccgcgagaccatccagacctgggtggaagacctgcgcgccaagaacggggcgcgcccgctctcagcggccatgtaccgccgccggcgcgccctcaaccactgcagcgtagctctcgagttcgcccagcggcgcagggtggcggtgggcctggaggacgacgagctgtgccggtccgtgcaggccgcgatggacacccaggtggtcggttcgtgcgcctactgcggctgcaatttctccgtcgtggccgtggtcgccgtggggggcctgggcatggcctgcggcgtctgtttccggctggttcgagtgtacaacccggtgccgctggttcgcaaccccccggcgaacgcggaggagaggtggaagggctggctgccatggtaggcgcggcagccacgaaggacgcctacgcgattttcatgatcagcggaaatgtagcactgttctaacacacatctgatagactggttattttgcagttctattagtatttttttagttaagcaatagattgcatagattgcaacgaaccgaatttagaatgttagcaatggtcgtccggaagaaggcacctgaacgatttccgttactgaacagatctgtttaggtacattagattaaacttttcgtttggctttaatccatactcacttatactgtttctacaatgtttttgtctctatagattgcagcagcagcagtagtctaaatagccggctttaatctgaagtgaatactgttcgctgtagctagattaaagctgctcggaccgctgcaacgacaatctatat

SEQ ID NO: 558 - protein, 378 aa, Zea mays
MATGGGSSRSDDVRGLKFGKKIYFEQDGGSGSGAGAVGGRKGKGVATGGARPASAASAAQPPRCQVDGCGVDLSAVKQYYCRHKVCNMHSKEPRVFVAGIEQRFCQQCSRFHQLHEFDQGKRSCRRRLIGHNERRRKPPPGPLTSRYGRLAASLQEPGRFRSFLLDFSYPRVPSSVRDAWPGIQHGGDRMLGTVQWHGHQEPPHPHRSAAAGYGNHAAYNCHGGLVAGGAPMLSSAAFELPPGGCVAGVAADSSCALSLLSTQPWDTTSHDHRSPAMPAAGAFDGTPVAPSVMASSYAASSAWTGSRDPAADGARNAQRLDDALHLVHPGSAAVHFSGELELALQGSGGPPHLPRVDHGGSGGGTFNHSTTSAMNWSL

SEQ ID NO: 559 - DNA, 4391 bp, Zea mays
tgttaggagttaatgagtataatgttttgagcatattttgacacctacaagtaattttttctatatccttctttatgatatactatacttgaaagaagattgaattaaaactaaaatctctctctcaagttgaattgttgtgccacatctttcactaatttataattaaagggtctcatattttttgtacttttttataattatatttaattgtaaatctcataaaatattgttagctcgtgtcatcaaatcactaaaatccataaataggattgatgcacttagctctttaaaatgaaaaaggtacaaaaatataaaaaaaatcgtgaaccccccaatcaatttctaattgcattgtgaaaacttcgacaacaaaaatataagataccaccaaaataaaatagtatcaaacaatatcatcctctatttcaaacttctttatgcaagcagcgtcattcacaatttcgcgtcctctattttacacactgtactgcagacaaccttaacatctatgttggttgtatcacatatttttgttgtagaaaatttccaaagcacatttaaacttgattaaaatattttgggggtttaacgatatttttttattattctagaactaaatatatttttaaagcttatagatatattttcgcgggctctaaatacttttttctccggtcccaatctatttctaatatttttgaactttttatatactttcaatgttttaaataaactttttccgattttcttagtaaaaagttgaaaccatcctaaaataaaaactatttctaaccatggtagagagctaatttaagcggctttaagatttgaagaagaaattgccttattttagagttcattcaagaaggaaaaaatggagtcctagttgagggaaaacaccacagattccacagccttcgcctgttcgccacctttcctccaaaatttgacccacacgcggcgacgcccgaggccccgagcgaccacatcctccgcggccgcggcgacgcccgaggcctgcaaaaccctaaccactcaggttctgccggccaccgccaccaccaccaccagtccaccaccatgctgacagccactcccctaccccatcagctcctggccaccttcctcctcgtcctggcgtcggcgacccaacctgcagtccctgcctccaccgaccgcgcagcgcttctcgccttccgcgcgtccctgtcgccgccctcccgcgccgcgctatcctcgtggagcggcccgctctcgccatcctggctcggcgtgtcgctccaccccgccacggcgccagccccttcggtcaccactccctccgttgccgaactctcgctccggggcctcaacctcacgggcgtgatccccgcggcgccgctcgcgctcctccgacgtctccggacgctcgacctctccgccaacgcgctttcgggagagcttccctgctccctcccgcgctcgctcctcgcgctcgacctctcccgcaacgcgctctcgggggctgtccccacctgcctgccgtcctcgctccccgcgctccgcaccctcaacctctccgccaacttcctccgcctcccgctctccccgcgtctctccttccccgcgcgcctcgctgcccttgatctctcccgcaacgccatctccggcgccgtcccgccgcggatcgtcgccgaccccgacaactccgctctcctcctcctcgacctctcccacaaccgcttctccggcgagatccccgccggtatcgcagccgtacggagcctgcaggggctttttctcgcggacaaccagctttccggggacattcctccggggatagggaacctgacctatttgcaggtgctggatttgtcgaataaccgattgtccggttcagtgcctgccggacttgcaggctgcttccagcttctgtacctgcagcttgggggtaaccagctctctggggcactccgtccggagctcgacgcactagctagtctcaaggttctagatttgtcgaataacaagatatctggggagattcccctgccgctggctgggtgcaggtctttggaggtggtggacttgtcaggaaatgagatctccggtgagctcagcagtgctgtagcgaaatggctgagcttgaagttcttatcactggctggtaaccagctctccggccacctacctgactggatgttctcgttccccctgctccagtggcttgatttgtctagtaataagtttgtgggtttcatcccagatggggggttcaatgtcagtgaagtgcttaacggtggaggtggtcaggggactccatcagagagtgtgcttccaccccaattgtttgtgtcagcttctgtggacacggtgtcatggcagttggatttggggtatgatgttcaggcaactactggtatagacctgtctgggaatgagctctgtggggagataccagaagggttggttgacatgaaggggttggagtatttgaacctctcctgtaattacttggctgggcagatccctgcggggcttgggggcatggggaggttgcatacgcttgacttctcacataatgggctgtcaggggaggtgcctcctggaattgcagccatgacagtgcttgaggtgcttaacctctcctacaatagcctgtctgggcctttgccaacaacgaagttcccaggagcattagctggaaacccaggaatttgcagtgggaaagggtgctctgagaatgcaaggactccagaagggaaaatggaaggtagcaatcaccgcggttggcttggtggctggcatggagagaatggatgggtatctcttggtgcattttgtatcagcacaatgactagcttctatgtatcattagcaaccttactatgctcctctaatgcaagaaacttcgtgtttcggcctgtgagggttgaatattaacaagaggggagattgcaaaatcaggttgttttgaagttcgagcgactctggtctgcagctgattaacaagaaatatgagcatatgagatggatatcttcagccaagaggaagtgctgtctcttttaatgatcaatcaagctctcttgattgtttcctaatattcttgatcttgggatgtgtagatctagttctaatattcctactgttatagaatgcaatcacctgctggtgcttggttgtagccctggcgtgtttggaggattggacaccaaggatgcacataatttgaagcgctggtactgtgaaccacttcagatgtaaatattttctttggtttttagttctgatctagtttaaaactggacatgtatttagtgttgttgagctacctttcgatgttatattatgtcaatttgctggaagatcatttgataacaattgtctaatccagtggattagtcgtgtagattgtgaagttcgttatgtttcttcttagtgctatgtatatcatctttctgtctgaacttagtttgggggtaaaaggctttgttattatgtgactgaaactgcaaatgtgcttgactatttcttggtgctgctcctgtaacacctatagttttataggtcaatggtaatagctgcctgaagcagcatccagcaggccggcaactgtttttggtactgtaatactttggaacagaggcgcaaagtttgtgattgcagaatgatcaacaaatgtatttattgcaaagtgtgagacaaggcaacatacatatctctgttttgtgcattaccaaactaacccaggctgtaattgcagattgataattcctatagccgtagcttcttcagctggataaggtggagaataagcatcagtggcttttcaaagggttcggcacttgtgcagaatcagactcatgcaggaatccggttctaacttttccactaaaacctttttcctttctgaacttgctgcagtacctaccactacttgtaatgttggatcagtttcacagttaaccacagaatttcattgcttttaatcaaacgtgaaatggtcacacagaaaaaccaacatccttcagaaccgctcgttttatcttgttctttagattacttcaaatgtgagcgctttgagatggtcacctaaggtgtgtttggttgatgtactaaggtgtgtttggttggatgtacaaagagtgatggaagggggcaacaacagtttctatagtgtttggatgagtcacgtgaggacgagataaacattagagtaattttttatggcggcgtgatcccaaaaaatcgagggaacggtgttattcctgccttatcctattttgatctcaaaccaaacacatcctaaactgtcttggatctagataaggtgacctggacgcaaacgacgactgctgatggttggtctcctgtcaggaactggctcgtctggcctagacaaaagaac

SEQ ID NO: 560 - protein, 613 aa, Zea mays
MLTATPLPHQLLATFLLVLASATQPAVPASTDRAALLAFRASLSPPSRAALSSWSGPLSPSWLGVSLHPATAPAPSVTTPSVAELSLRGLNLTGVIPAAPLALLRRLRTLDLSANALSGELPCSLPRSLLALDLSRNALSGAVPTCLPSSLPALRTLNLSANFLRLPLSPRLSFPARLAALDLSRNAISGAVPPRIVADPDNSALLLLDLSHNRFSGEIPAGIAAVRSLQGLFLADNQLSGDIPPGIGNLTYLQVLDLSNNRLSGSVPAGLAGCFQLLYLQLGGNQLSGALRPELDALASLKVLDLSNNKISGEIPLPLAGCRSLEVVDLSGNEISGELSSAVAKWLSLKFLSLAGNQLSGHLPDWMFSFPLLQWLDLSSNKFVGFIPDGGFNVSEVLNGGGGQGTPSESVLPPQLFVSASVDTVSWQLDLGYDVQATTGIDLSGNELCGEIPEGLVDMKGLEYLNLSCNYLAGQIPAGLGGMGRLHTLDFSHNGLSGEVPPGIAAMTVLEVLNLSYNSLSGPLPTTKFPGALAGNPGICSGKGCSENARTPEGKMEGSNHRGWLGGWHGENGWVSLGAFCISTMTSFYVSLATLLCSSNARNFVFRPVRVEY

SEQ ID NO: 561 - DNA, 3169 bp, Zea mays
cacacaacgcaacgctcttatgtagtaccacactgctagctgaaaaaagtacaagcgaccggatgagctataaaaaaagaaatcagatttcttttcaactcatatctttcttaccctgttggctaagataaaatctaatatttattcgtaccagtttaatatctgatatgtttttgtatgaaattatttttataggtatttttttgtgaagatcaaccacattgatttactaggccctcgcatatcgcttagtcacattgcattgctggtagggtcttttccaccccaaccggtagcatcaaataagattaaatggttatgggtcttttccaccccaaccggtagcatcaaataagatcaaccgttttttttggcatgaattcgagctagagccatggcaaagagacctaactaactcatgtatgttttcttcgatcgaaagtcgaaagttaggttacttgttgttgttgtgagtataatataaaaaaaatataattgacacgcgcgtacagtataaataagcatgcagtctagctggggcacgatggccgacacgaatgaaacacgtttgtttgtccggtcgactggaagcacgacaaggccgtgctgctgaagcagccctgtggcgttcggcggcctactaagagcccaccacgcggcccttggcagcttccgtcccctcctgatgaaggagaaggagatgaaagggaaaggagctggattggattggattggatagatatcgtgtttatttgtttgagacggtagttttcatctaaagtttattcttcgtcacatgggatggccgtttgcttgtttgttgcttccgggaggcggtggtgaattgaagcagatcgacaagcatggctgcccactggtctcgatcgatcggcctgccatgccatgccatgccactagagtccgtcctgactggccgcccgttcccccgtataaaaaggcaggcaggcaggcagagcggggacgagcaagcaagcagttgcagttgcagcggcctcctcctctgcttcctccctcctcctcctcaccatggtgctggctgcgcacgatccccctccccttgtgttcgacgctgcccgcctgagcggcctctccgacatcccgcagcagttcatctggccggcggacgagagccccaccccggactccgccgaggagctggccgtgccgctcatcgacctctccggggacgccgccgaggtggtccggcaggtccggcgcgcctgcgacctgcacggcttcttccaggtggtggggcacggcatcgacgcggcgctgacggcggaggcccaccgctgcatggacgccttcttcacgctgccgctcccggacaagcagcgcgcgcagcgccgccagggggacagctgcggctacgccagcagcttcacgggccggttcgcgtccaagctgccctggaaggagacgctgtcgttccgctacaccgacgacgacgacggcgacaagtccaaggacgtcgtggcgtcctacttcgtggacaagctgggcgaggggtaccggcaccacggggaggtgtacgggcgctactgctctgagatgagccgtctgtcgctggagctcatggaggtgctaggcgagagcctgggcgtgggccggcgccacttccggcgcttcttccaggggaacgactccatcatgcgcctcaactactacccgccgtgccagcggccctacgacacgctgggcacggggccgcattgcgaccccacgtcgctcaccatcctgcaccaggacgacgtgggcggactccaggtgttcgacgccgccacgctcgcgtggcgctccatcaggccccgcccgggcgccttcgtcgtcaacatcggcgacaccttcatggcgctctccaacgggcgctacaggagctgcctccaccgcgccgtcgtcaacagccgggtggcacgccgctcgctcgccttcttcctgtgcccggagatggacaaggtggtcaggccgcccaaggagctggtggacgacgccaacccgagggcgtacccggacttcacgtggaggacgctgctggacttcaccatgaggcactacaggtcggacatgaggacgctcgaggccttctccaactggctcagcaccagtagcaatggcggacagcacctgctggagaagaagtaggcatgctatttgggtatggaagatggtggatgtaagcaaacaaagccaaattaagcagagtaggttaattaaggttggctgatgatccatttagggaaggagctgatctccctgactccctcctccaattttctcaaccaaatttatatagtataataataataataaaatagcaagtaatagttgtatcgtattattattaattaatttattagctggtaggcaagtagtattaaataccatttgtagtacgatgggcgtatttctattttggcgttttgctctgtgttttttgacgtttcctttggatttggggggacctcagatcagctcggcctgctacactgcatgcatgctaccatatcataccatgccatgccatgccaatgccataccccgcagcagttgattccatccatcactagcttagctacctgctagcgagagcccagaaattttatcctcgagtcgatcgagacctgcccatggattggaagaaatgtcaaattccatccaaacgctgtcgctagcaaatggcgtcgctgatgagtgcatccaaacgctgacgcccgtgggcacctcttttccatgttgagggtgttgcattgctctgtctttcatggacgaaagcccgatccatcttggacacgtgacggtggcgttctagaggtcattcccttctgaaggcgtcatgttggagttgtctcgacctcaacattgccttcggttgatgctttcgcttctcgacgtctcgattgcgggtggaggtgtggttttttgtaacgtgaagtcgatgctgccgcattaggggatgtggctcgacaacgatgacatgaggcgaacccccttccttgtggtctggattgttttgaaggtcgcacaaaaaaacagaagtgggtggtggatcaagatcgttggtgaagaatcgtagctgcctcgagtggggtgtgttgaggcttggcaacgttggcgtgtcgcggtcttcctccttctgtgacagggttta

SEQ ID NO: 562 - protein, 371 aa, Zea mays
MVLAAHDPPPLVFDAARLSGLSDIPQQFIWPADESPTPDSAEELAVPLIDLSGDAAEVVRQVRRACDLHGFFQVVGHGIDAALTAEAHRCMDAFFTLPLPDKQRAQRRQGDSCGYASSFTGRFASKLPWKETLSFRYTDDDDGDKSKDVVASYFVDKLGEGYRHHGEVYGRYCSEMSRLSLELMEVLGESLGVGRRHFRRFFQGNDSIMRLNYYPPCQRPYDTLGTGPHCDPTSLTILHQDDVGGLQVFDAATLAWRSVRPRPGAFVVNIGDTFMALSNGRYRSCLHRAVVNSRVARRSLAFFLCPEMDKVVRPPKELVDDANPRAYPDFTWRTLLDFTMRHYRSDMRTLEAFSNWLSTRSNGGQHLLEKK

SEQ ID NO: 563 - DNA, 2124 bp, Zea mays
ggccggctagcttttgtcttatactatatggtttacaatataatgatgtatataaataatgtttctcaaagctatagtattttagagttgttgaaaactacgatattatcgtgacaattgtaacatagtatagtattgtaaaaccatggttctgagaaatattgttgtcaaaaatgctcttatctagttcatgcatggcatgtctgtcctacgcatgcaggaagggaagggatcaagatggaacagagctagctatgggtatcccactcactatctactgctaggtggtgccaagaacatataaaattcatctctactgttccatcaacgggccaattgcggcatcttcctttttattccattcaaacggggaacgcatgtagctagctcaagtacactacatcctctcttttcctctcctataaataccgtaccacccccttgggaactcaccacccaaataagcataaatagtagtggttgattgtgtaattccagagatataaacgaatatctctagagatctgcctcatcaacagctgcagtatttgctagccacatatatatacacagttcgacacgtagttataacggaagagagaagcaaagagagaggcagagtgactgcaaccatcagtagttctatgattttattttttaccgttttgttgctgtttcatggtgtttatttgattgtagggtggaggagaggtgaaagctgacagaagagagtgagcacacatggtgcctttcttgcatgatgtatgatcgagagagttcatgctcgaagctatgcgtgctcacttctctctctgtcagccattagaactcctctatctctcaatctcgatctccctctttctttgttgatctctcccatggtgatatttatttgcttcctacgtgttgtgttctctttcttcagcacacacacaacctgttcatgttaccttagggttaaagtttttgcactttgcgtgaagatggaaagacaaacagtagatgagttttttgaaggtttgacagaagagagtgagcacacacggtggtttcttaccatgagtgtcatgctaggagctgtgcgtgctcaccctctatctgtcagtcactcatcaagcccatctgtcttattagcttgtttccgctgctaataaatattctagactcaagtttatttgacacagagatcgatcgctatcttgttcgatgcatatatatatatatatatagaagtattatttacatgtgcggatctcgtgtatatcttcttcctgattagctgatgatcttattctcatgtgtagtttatttgtcttcgtatctaactttttcgcaggggccaagccatgattgcgaagaaaggaatgtaaaagatggctcagaactccatcacaaagtctacatacggtcgaaataagatctccatcagatcggagagctttatttattgattgtttttttagagttctagagcaaagcccatgtcttagcattaccaagacaaaagaataatccatatatatatcctttggatggttcacatccttcactccaggtttaagtttaaccaacacaaataaaaatatataattaaacgaccggcacatagagacaaaaactcaaatctccaagaacatctccactgtcagcagcctccaaggtaaaccataaattttcaatggaacgatcatcaaccaccagggaggaggatatatagcctctgctcttcaaatcttcaggtacttccttggatttctaattcatggctactttaaataccatcctatctctcacacccccaactcctgttgatctagccactcaatcttgcaggtcttgtggccagattcttgagtttctccagcttcactttgaagtccagtttctatgcctgaaggcagagcagcctcagccttgcttgtagcatgactgccatgttcaagagtaaagacctcgtgtctctaaggaacaccatgaaaacacagttgtttcgtgtcagtttcgaaagcctccacagggctgcaagaatcatttgtgtagtagtggtggttgacgtactctctctcaaagaaagaacatcatgtttcttaggttgttttttagtgcgccttcatttcattctct

SEQ ID NO: 564 - protein, 3 aa, Zea mays
  misc_feature (1)..(3): Xaa can be any naturally occurring amino acid
XXX

SEQ ID NO: 565 - DNA, 6226 bp, Zea mays
aaaacaaagacccaacagtgcaacattgcaaaaataaattctcaaaggaattactcctggtcatctagagagcaagaggaaaatatgacaattcaatcccagactgtcttaatcagtggcagtcttaaccctatagctcattcggtttaccttctcaactattcaattaggattctcctgtacatacactacgctgtaatttaccattattaatacaaaatttacagtaggagtctctccctcctgatctttaaaaaaccacttgatcaccttctccttacgttcaaaggacaacactattacttcgtttggatgttggaatttggtagcaaggaatcgaatagatgttgaataccaaatcgctaaagatatttagcgctcccctatcgatgcaacgctgctcgcttgagcccctctatgctctacagtacaagggctatacacaggaatccgcgaaattcggcctgaggctatccgcagcggttcttcctaatttttccctctatatcacttttttgcgtcacatcatcaacatttcaccccctatttttttcatctcccgcagcggttccccctatattatcccctatacccaactaaaaatataaaatatcattatctaaccatatttatcttttattactatttttatcaattattaaataggggagcactgtgcaaggggcgctacagtgctccccttgatctgggggacgtgcgcgccctctccttacgctgcagcgcgtaggggctctttagtgtcagtcgctgcgggcctagagatcccgtacgtgagagacagaggaggggtcacggcgtcgcaagcgctgcggccagtctgagcaaaccaaccctttgtctgaaatgtcgtgcgcgcgcattatttgttagttaggtaaaataatattttatggctgaggtagggagcggaagaatttaggagaaaacccgttgcagaaaagagaaatgtaggagataaaatctgatgatgttgcgcgcggtgccgccacaagcccacaagcttgcgcagcctccctccgcccgtccctggcgtctacaaaaagccctcggcaggtggcgagtggagacgctccctcatacctaccagccaaaccaagcaagcagggaatccccacaaggcagcagatggaagcgaaaggtggcggtggcgcggcgtggcgcgggcgcgggcgcggctagctaggccggctcgtgtgcgtgcgcgaggagacagccacagccatacagggatgctgcctgcttcgtgaccgtgctggtggtggtgggctgcagcctgcagctcgtatcacacgcccacagtgcaggaaggagggagtggaagaagagagaggaagttgtttttaaaggcaacagcgagtcccgctgctgtccctctccttcgccacctccctccctcactctcttccctccctctcggaggaggagagagaagagagggagccagtccagctccagccagccggacgcccggaccaacaccaccccgcctccccctccccccgccccaccggcccgccctctcgcgctgccgtacccacggccccacgcacgttcacaagtctcgtcgccgccgcaatggagtccggcggtggcggggacgaccagctgcacggcctcaagttcggcaagaagatctacttcgaggacgccgccggctccagcagcggcagcagcagcggcggtggcagcgcgcccgcgcctccagcgacgcagcagccgtcgccgccggccgcttcgcctagggccccggccggcggcggcaggaggggcagggccgcggccggcggcgcgggcccctcgacggcgcccgcgcccgcgcgctgccaggtcgacggctgcaacgttgacctcaccgacgtcaagcccgcctactactgccgccacaaggtgtgcaaaatgcactccaaggagccccgcgtcctcgtcaacggcctcgagcagcgcttctgccagcagtgcagcaggtcaccacccagccccgccccgccattgctgcacagttgcactccccccctcttccacctccacctctcattcaattgattgtttccagttgtcacttgttggttgcattcgctctgcagtctgctcccccgtgtttttttttccagtcccactcccttcattcacagtctagggttttagggaggctacctagacgaagaccagacggtttcaggtccatcataccacggacacgctacaaaactatagatgcgctaaacagtgggagctagggaaagaaacttggctcggtttgacggagcttccatcccatttcatctatggcgacggcttctcctcctgaagctgaacaagaacgaaggaggaaaaaaacaaaagctgctttggcattactgctacgctttaatgtttcgcttgaatggtgctcatgagcacaggtaggtctgatggatgctcctcctaaaaatatgatagagtgatgtgactcagcctgcccctgccctgccctgcctgtctgtcagttcgctttgcattagattccaccgctaatactactcgggtatcccagtgaagcctgtcagctaacaagccattacaataagcgattagtagccttgagcctggttatacgtgtggtccccaaaaaaggaacagcaacagtgaggaattttcaaaggagtctttgctttgccgatgcagtagtattttaatttagaggagtcccaactttgcacaggttgacactatccattgttttagctagctagcctgcctcaaatatagcattatacattgtttgtcccctgtacttaaccatactacatcgggcatccttcgcccccgccccccccccccccccccccctttttttttttgcattatgcaaatggtcccccgaggaagaacaagttgtagcctttgcaatgtgttgttcttggcgctgcaactttacaggttgtacgatcctgttcatccggtgtaagatctggaggatttctagtcccttcaggtgctacaccaaactagactgttcctggaacagctttgtttcctttggatacaattagcattttcattcataaatcttaattcagtcatctatctaatttgacatacaatagagagagagagagaaactaaacatgatggtggcgagctgcatctaatttgatatgggtagggcctggacacattaccctagcggcgaccgcaggctttgtgctttaggactaggctacaggagtgtcctcatgtccccagcaaaagagaagggcgccacagttctggatttggggctctctactaaaccacactgccacttatagcaacaaggcatatcattagagaagagctaagttggaccagccaccagtaccacttggcgttattagatggaaacctcattattggtgggtgtgtactgttgtgttaagcccggcatcacacatctctatgaaatgattacacacacactttctctttgcttttcttttctttttagtatggatgtgcaggtgtcattatgagcggcataagacagaggttaatgttaatctttaatgggggatgtgcagtagtacaaccctaacctagggagaagagaaatgttactctctttgatgattgtactggcattcccactggctttgacctaaagtgtggtttcctatatccatgtcgcgctaagcgctatgcatgttgctagctactactgagataaactagtgccttcaacttgctacgtactgtcccaccattcagcttgcactttattctactgtaagagttactactatggtaaatggtttatgcttggtccatggaacttttttactgcctgatttgtttgcattctacacaaaagctatgaatctacagcaatgtatatgtggatttatagaatgcaacttccattacttataaaaattctgttgctgtgccaccaacttccattacctgtaataaactgggatcaagggcgcgtgaatgaacacacctctgtttgtcgcatcaatcgcaggttccaccagctgcctgaattcgaccagctaaagaagagctgccgcaaacgcctcgcaggccacaacgagcgccggaggaggccgccgcctggaccccttgcgtcacgatacggccgtcacgctgcgtcgctcggcggtaaccaaaagctggtttttaccctgtgatgtcgtctcggcgaccaaagttcccgtcttttttttgtaaccgctaatgttcatgtgcttggtccagaagagcccggcaggctcagaagcttcatgctggatttctcgtacccgagggtctcaagcgccatgaggggtgggtttccggcggtgaggcccggtggtgaaagggtgcctggcggtatccagtggcaagcgggcttggatcctcgtcaccaccaaggcgcggtcgcgggatacggcgcccactatgggagcgagggtggtagctcgtcgtcggcgaggccgccggtgttccctggcccggagctgcccccaggtggatgccttgcaggagtccccgcggactccagctgtgctctctctcttctgtcaactcagccatgggatgctgcccacagccacagccacagccacgctgcgccaacagcgggtttcgacggcggcagccctgtggcgccctccctcatggcggcgagtagctacatcgcgccgagcccctggaccgagaccgactcctggggccacgaaggcgggcggagcgtgcctcagctgccacctgacgacgtccccctcggcgaggtgcactccggctcgagcagccaccacggccagttctcaggtgagctcgagctcgccctgcagggaaacaggccagcgccagggtcggcggcaccgccagcgccgcgcaataatcagggctccgcgggcacgttcgaccaggctggcaacacgatggactggtcgctctaggccgggggccgaaataaagcgcagcagatcctagccgcgcagggagatggaggaggctgaaagtctgatgctgcacgctgcttgcttagcttagagcatccagcatgataagagtgatgaactgatgcggtgtcaggagactagtttattctgtgcttcaccatgaactcgtctgtcgcggcgtctatgtagacagacggcacacgtccgtggttcgaagttaccagtatgcttgtcggggactttgctcgcgatgcattaatctcattgttcaccatccagaaatctcatgttctctactcgtttgctggcccgtccatgctgccgctgctgtggtctttacatcaccatggctccgcctccatgcatcatcatttctactgaataataatgtgcttgtaccctccaacgttgccgcctggcattgccaagaatcggttccaagggggtgttgtttaagtaaagcgagaccacaggcacagcgcggctttgcagcatgctcttggcaccagtggtgtggtgtggtgttgctgctgatagactgaccgacggcagaatgagatccacgcagcagcttctttcaaatccacaaaattttctcagtggagaacaccagcacctttcctgcgaaagattttttccccttcccttgcgaattcatttcccttttgcccaaccacacagtctgctgcgcaggtgtttcaatttccttcgctcttttgtccagtctccactgttggttgagcagccggcgttctcgatttcttcactgttctggatctgttgtacaggtcgggactgtagctgccgctgcgctgcgtgattgatggtcggaacagttctgaggaacccacgctcgaaagaaaaccaatagaactgcatcgaccgcaaatgctgtcgtctttcgccatatgcagctcctgcgacgatgaacagtgatcgttccaggcttaccatcggtgctcagtgatccttagacgacacacagtgcagggattctatcgtcacactgtagatgctcgagagagagtagggttgggcattcacgagtcacgactacaagctcgagcagattgtcagtgttaaaagacagatttcaatatggtcgcagattctttgtcaatatatatatatatatatatatatatatatatatatatatatatatatatatatatatatatatatatatattgttggggccttcgtcctccgaaggtcctcaaaaacatgatttgacaatgttttccaagtggattatgtgaacaggtaccttcggactcagaattacgaacatgaag

SEQ ID NO: 566 - protein, 403 aa, Zea mays
MESGGGGDDQLHGLKFGKKIYFEDAAGSSSGSSSGGGSAPAPPATQQPSPPAASPRAPAGGGRRGRAAAGGAGPSTAPAPARCQVDGCNVDLTDVKPAYYCRHKVCKMHSKEPRVLVNGLEQRFCQQCSRFHQLPEFDQLKKSCRKRLAGHNERRRRPPPGPLASRYGRHAASLGEEPGRLRSFMLDFSYPRVSSAMRGGFPAVRPGGERVPGGIQWQAGLDPRHHQGAVAGYGAHYGSEGGSSSSARPPVFPGPELPPGGCLAGVPADSSCALSLLSTQPWDAAHSHSHSHAAPTAGFDGGSPVAPSLMAASSYIAPSPWTETDSWGHEGGRSVPQLPPDDVPLGEVHSGSSSHHGQFSGELELALQGNRPAPGSAAPPAPRNNQGSAGTFDQAGNTMDWSL

SEQ ID NO: 567 - DNA, 2746 bp, Zea mays
tacccagattcttctacatcgccatagaggatgtagaggacctcgagcaggccatctagctggcctccgactcgccagtcgtcgcggcggcggcgtagatatatttttctcccccacgtctcctctaacaaccagataagtcttgtatattgtatgtcgtgactctccaccgccatacaatacgtggctgaacagccaagggagagaaagaggaggcacctatgacgttctcctcctttattttgcggtcctttattaatcccaacttttctatttcttttcttgttttcccctttcccacctagattcatccttgcagtgtagatctatttttcttccacacgtctagcctaacaactagataagataaaacttatatcttatactctctgttccaaattaaaatttgttttagtgaattattggattcaaacaattcttgatattttgtatatgtgtctagatttatcatcatttatttgaatatatagataaaaaacaatagttaaaacgaatattattttaagacggagcgagtatatcatcatacgatacgtggctgatctcacaatctcaacgtggtcaaagttgtgtgtgccgggccatctgcgcgtcgtgtgacaccggtgcatgcgcagccttttgttttgccgccccgcccgctccatgcatggcatgggtgcaggttctgtagctatgcccggaagcacctagctagctcgcagcctacatctgcaaactcacaaagtttgggtatcggaggcatcagcaggtcgggttcaatggaacgacggatcacgtctgtgtgtcgctttcgcagcagcggggagagcgcggggcccggcccaggacgcatggaccgatggacgcatgcagaccatttttgtttttgtttttgtttttgtttttttcctgtctaaaatgtaggtgtgctctatcttgcctcttcatgcgataatgtgtgtgtatatatatacatgcccttcactcttcttatagctcgctagcccagctttagtttatagcactctctcactcagtagtcagctccctccatttgtccattctccaaaggtagttagctaggttaggcacacgcgcgccactcgactagctagcagctatggagggagaagatgacggcgcccaaatgaaactgcagcaacaacaacagtcgccttgcagtgacaacttgagcttgtccgccgcctcctcatggctgccgccacaggtaaggtcgtcgtcgtcgtcgtcgtcgtacacctgcgggtattgcaagaaggagttcagatcagcacaagggctgggaggccacatgaacatccacaggctggacagggccagactgatccaccaacagtacacttcacaccgtattgctgctccccatccaaaccctaatcctagttgcacatcagttcttgaccttgagctcagcttgtcgtcgctgctagcgcatggtgctgccagcagcgacggaggcttgtctgttccagtggcaaagctggcgggcaaccgtttctcctccgcatcgctccccacgaccaaggacgtcgaggggaagaacttagagttgaggataggagcgtgcagtcatggcgatggcgcggaagagcgtctggatcttcagcttagactgggctactactgagccagacagaggaacgaactgctacaatgggtacgtgcagtgcatgatgatggaatgactggctttgtataataataatgatgatccgattattgttatttctgtatgctaaatatatgtctcttatgttagatttaatatatatgacatattttatctaactaaattaaataaattatatataggcgtcaacgtattaaatacgtctagggcatcgtagtctttccgaggtgtcttaacgtaggaggctttggggccatcggaccctccgggctccggagctttcaacgcctcaacggcgtcgagatcgaccctctcactactgaagacggcagacaaaacaaaatatactcggcaaaatatttgtagagtgccacactgagcaagagtactcaatgaatcaaatgtcggcacatagacaagctgaccgaagttaaatgaccgacaaagatttttcggtttctattctgtgaagtcctaggctggcatgttgtcatatattgaagctaggagcaaagtttagcactgcacgcagacatggttgtcaatgttgtgggtgcaccttgtagtatttaatactccctcaaggtgcaaattataagtcgtttaggaaaacgacaggtactccaaaatatagctttgaccaatatttttttttaaatacaaatgaactcttaatacatttatactttcgtaaaagtactttttaggataaatcgacacatatgactattaggtttcaaagctaaataacaaaacgattatttgtagtcaatattttacaagtttcatttaatccttgtccagaacaacttataagttggacaagctaggccttgcaaatccgatggttgtggaaagaaaaaatgatgttatgaggccttggaaaggattggaaattcctatccttcccaacgcccttgcaatggcaataacacgttgttttagtcagataaatggatcagaggttacagagtatcagatttagctccttctcttatgactgtagttctgaaaaagattaagggctagttttggaaccccattttcccacgggatttttatttttccaagggaaattagtttattttcctt

SEQ ID NO: 568 - protein, 175 aa, Zea mays
MEGEDDGAQMKLQQQQQSPCSDNLSLSAASSWLPPQVRSSSSSSSYTCGYCKKEFRSAQGLGGHMNIHRLDRARLIHQQYTSHRIAAPHPNPNPSCTSVLDLELSLSSLLAHGAASSDGGLSVPVAKLAGNRFSSASLPTTKDVEGKNLELRIGACSHGDGAEERLDLQLRLGYY

SEQ ID NO: 569 - DNA, 3704 bp, Zea mays
ataaaaaacggacatacacacggatatatatatatatatatatatatatatatatatatatatatatatatatatatatatatatatatatatatatatatatatatatatatatatatatagagagagagagagagagagagagagagagaggatgcatgcttgtaaagaacggaagagatatagtagcagggcaagaaaggggcacggtggtggtggccgtgctagctgggggcgcattcaagcaagggcatgtagtacgtacgtacttgttggttgcacacattgatgggagtttgtttagtttccttttcctcgcagggaaagggaaagggaagctggctggcctgcaacggctgcaactgcaaaggtggttgcttgcattgctcatcctgctccgtcctcacgatcgatcggcatgcatgcatggcccatgcatgggaatgggaacggcaactgcaaccgcaagcacacatctgcatctgcatgcatgcctagcttcctttccttctgggctagctaagttaagctagctcctgcaaccgcaagcgacgacggcgatggctaaccgctagctaggtctcgatcgatcacaccacctcgctctacaactacgacgttcgttacacttgagacgccgcagcagtacgcgcgctagccgccggtgctggtgatgtgtgtttcgttgtctggtacgttatctaatataaaacctgaagaatcaaaattatttaataataatattgactgatgaagcattcatggatatatgcatgcatgcagtaaaaaacaaagaaagctgctgggtagccggccccacaagtaagtacgtagcacgtactcgtgtcaagtttgcgcagctgatgcctgatgagggcaccacacctaagctagctgctagctagcttcttccttagctgcgtacctttctgactctcaggctttgtgtactgatcttatatttataaatatatatgcgccaagggcaagcgaccccagtagtcgtcctcctcctcgctcccagcccagctagctagctgctgcatatgccttctagctagctagctttcatccccggccccctttcgatccatccatcctgtgttccaagttcatcattcactcgtcactaatagctttctatctgatcgattcatcatcatccgggcatgcatgagcatcatcgtctccagatcgttgggctctcgcagctacctacattcaacattcaagctcgctctacatatgcatgcaaatctgcaacactcgctcttggcagggatacattcacgccgagagagagagagagagagagagagagagagagagagagagagatgtgtgtgctgtagtcatcagccagccggtgatttctggagtggcatcatcaagattcacacactgcatgccaacataatgcgcgtgttcatgcatccatcgccgccgctgcatcatgcatcatatataatatatatatatgtgtatgtgtgggaatcttgatgatgctgcattggatatcaagggctatatatatatatggatcaagcatatatatatatatatcagatcaccagtcatatcgagttcttccttccaggcttgctaggtaatttataacttaaaccttgttgctgaactaactaattttacttagctagctagctactactatacttcattgttagtagtagctagcaagaaggaaagtaggcatcccggccggttcgtaccttctttttttttgcacagcaggatctgaccttctgtataaaatgcatttttgccttgagtttttttgtttttccacagtaggaggtagctgattctgatctgctgtataaaaatgcatttttttccttttcatttcatggcagaaggcaatatataataagaaaagactgaaaggaaaaggcaccactgccatgatggatcgcatcagtgcatctgttttgttcttctaaacgattcaggtcatcaggtgagctaggttggctaataagtatatagattaatttctattttgcacatgatttatatggttttgactaaatagttatttagcttaccaagatgtcgccaccatgctcagctcagctcagcacagcaggatttgtatcgctcgtatgtgtggctgggctgccagagcgtgttcggcccaatctaaatccggattggcatagcaggccaaactgggccagccatggatgaccccgacccataattgtatgtttgggcctggtttggatcatcggtcaaactgacccagcgggctgcttgcttcaactccgatctccactctcctctcctctcctctcctctatacagagattagagagaagagatctaggaaggcagacactgcaactagctagcaggtccggcaggccgcacgccatggacgcctccgccggcagcgtgctctgcagcaggagctactcggccagcgtgagcagagcctcgtcttcccagcaagcagaatcgtcgtcgcggctgtgcgtggaggagcaccgggcggaatggtgattcatctgcatgtactacgagcagcatttgttcgatttttccgctgtgttcgtaccgagaatatccagtcacttgtgggtccgagagagcatttcgtttgtgagttttagtgtttacaaggattaagtgaaaacttcacaagtaagtcgtaactattttctgcaaataagttttattgtcttacattcaccctcctctagacgtatgtttcggtccttcatcgtcgcctccgtcatgttgtgatggtcctaaaagcacatatatattgtatctactaggtgtgtgaccgtgcgttgccacagaagttaaaaattagtatacaaatctagatacagaacaatatacaaaatctttgtgataaaatatcactgtaacactaatattatattgacgatataaatatataatattattataaatataccgactcaaatagaatgaactgacgtcgaacaaacattataatcaagaaaatcttattgatctcggtcaaaatactgaaccaagtagtagcaagaggctaagaacttaggaaaatgattttctaaggaatcttcagactcctaggtagcttcttcttctgtgtgtgttggttccattgtactttgtaaaacttgagagtcctttttcgagtaactcggtctttctaatccaaaacttggatgggatattccgaataggttaagtctggttccaaattaacatcagacacatccatagtttgatcagggatccgaagacacttcttcaattgggatacgtggaacacattatgtacagcagacagtgattctagcaactgaagtatgtacgcaacctgcccacatcgttcaagaatagggaacgggccaatgtatcggggtgctaactttcctttaaccccgaatcgactaataccctttatcggtgatactttcaagtacacatgaggttggacggacggtctcttatgcattgactgtaaagtatgcctacgcgaaggccgctgattgtatagtggatggcaattttgtcatcaatcagggcagttgcgacttcaggaggaggaactttttataatagtcatgaaggctttccttttcttgttgtatgcagagggacaattctgccaatgtggttgtttcaggtctatagccttggaagttgagtaggaacttatgtaaagggtcttccaagaatcc

SEQ ID NO: 570 - protein, 3 aa, Zea mays
  misc_feature (1)..(3): Xaa can be any naturally occurring amino acid
XXX

SEQ ID NO: 571 - DNA, 7041 bp, Zea mays
tactcgaagaaagcaccaatgctgaaaacaacagctgaaccaaaagttagacctctgatacaaactgaagacaggtcactatccaggtttctattgatgctttctctttggccacatcccaggtacaatatatattccattaattcagcaccatagtcaaagatgaaatattacgaatgtatatgcatgctaaaatggcctgtttgcagggctgtggacctacccacttacatccttgggtacggtaaatgccatggcatctttgtatcagaggccatgtttagcacaactatacatccaagaaccatgtcgaatttaaggtttgcaggataaaatatgaggtgtgtacttattttagaaacgatgggtatgttttaatccaaactaataaataaaactgaactggaataatacgtacgtacaacatacgcacaacttggtccaagaatctgtacgaattagggacgagcagttccaaaaaaaaaatcttggagctttttagttgtgccacaaacagtcccctatgcctatgtatacatccacactaaattaaaggacgtcgagtcgtcagattgatcgatcgatcgccctttattggagtgatctcggtggagatgacacatatctgttcatcaatcacacacaggcactagtacccggcctaccacagcgaggtagcagctgcagtggtggatcgatgtgaggcgcgtgattggatggacgcgccaatccaaccatgcactatgcatgcgcgccccgagatgttatgagcaggcgtacacttgcatgagcgagcgggagatggccgatcactgtgcaggggttaggccggccgtgtgtgcgtcttgcttgtctcgaatagatttatggtgcggtgcagctagccagctctccgcccgatcgctgcgtggttggtctcgtgcgtacggacccatgtgtgcggggggcccagacattattgcaggaatagaaaccctacccctatcttctcttgcaacccaactctctctctctctctctctatctgtctgcccgtggcgtgctccactgattcttcttcttcttctacctcccggcctcctcccccttcttctttgcctgccttattagtatctcgcctcacaccacacagctagcagacagccagacacgcgctgctttctgatctctccccggatcggaggctcctcccaacataccaccctgccagccgcgccgccacgtccacgccggccggccaccaagcaagcatggatatggtttcgcagtccgagcacctgtgctacgtccgctgcacctactgcaacaccgtgctcgcggtaaactcctcgagaaatcggatccgaataatgaaacatcagtcatgcatggcgaagatcatgagatacggctagcaccagatatggcatttcttctgctcgttatttctttgctaaactcagacaagttttcttccccggttcccatttttcttttcatttgctttcttttctttcatgtacatgtatatatccttgccttgtacgcatggcgatagccagtgctgctactagctcattattcacatggcaaccaattaaatccagtctttctctttcttgccttgagattggatgagaacgcatatatacatccactagaattgacaccactgttgtgtcacacatgctttccgttggctttctgttgattctttgtggaatattccgcttgatagtgccgtgttccgtctttcacttctatatgtttggtgcttcgcaagcatccatatcttctcttttttgttgttgcatgtatactgaagttcaaactggacaagagttttctgtttactctctgctgctttctccacctatgctagctcatccctcagtttctttcctcctttagattttttattttcttttccagttgctaatgcttcgatcgacagtgccatgcaaaggaatggagttgatcttgtaacaggccgttgatctgattgcatgctgtgattgattgattttgtgcttcttgggtagctgcaggttggggttccatgcaagaggctgatggacacggtgactgtcaagtgcggccactgcaacaacctctcctacctcagtccacggccccccatggtgcagccgctctcgccgactgatcaccctttggggccattccaggtatggatcgatacagctcgttctctttggttactcgaacatatcttctgatcttcagcaagccgtgttcatcttctttgaatatgctagcattttttggggaatggaaattaaataaatatagacgaagtgaaaaaaattgaatggggttttctcatgaaatatggccatggtttggctttacttccagctgcatccgcttactgctactttgctctcactcctttctctctctttctttctctctgctttattgaactactcaaagtactgtttgcaaggcaagattaaacaacgctggactacaaaagatttctctttgctcatctctgcgcgttggcctggcaaaaggcagtgttgagcttttttaaggcggcggtcgcagcagtagcagcagctgctctgctgtggtattcatgaatgcatgcttctcctcaattcaaacacattttcttttggaaatagagatctatatccacgaccagatttgatggcctagtaaatggtaactagctaggaaatgcatgcttccatcacgcatcatgatgcatcgctaacgttgtgagagattttgaagcgctgggatctatctttgattgctatgctgccatttctcagtgtcagggaccctgcaacgactgcaggaggaaccaaccgctgccgctggcttcgccgtcatcaactgagctaagcccgagaatgcccttcgtagtcaagcgtaagtagcagctgaaagaagcacaccatccacttccttgttccttgctctctttttttctgttcttaagggatttatttttactttcttctcaaactctatgctcctgttagtgatgtgtgattgaagataaacagcagttaagtttgttcttgtactcaatgcatttgttttctttcattgcagccccggagaagaaacaccgcctcccatctgcttataatcgcttcatgaggtgaagaaacatctttttctttattttttaaaaatttccaaatacatttttttggataattgtttttttaaatacatatggtctcaaatagttacatgtgatctcaccttgcttggagtcaagttcgcagccctctctatatttacaaatctgattttgtaatgtcttctcaaactttgaactaagttcgacaaaatgttgaactaagatggatttgcatccaccgtatatggatactctctgctagctccttagtccttacacactttctccaactcgatgaagtaaccatctagtaacaagctaggcttgtaaatccgtacaatataagcctgagtatttacacagtagcagaagataatgcttaaaaatgtgagacgaacttgctgtgtagatatatatcgaggtctggatccgtcggtcagcagtttacaaattctactcaagtagttggactgtaggagctctgagtgcagtaataacaactagaccgcgtgcaaagttcacacattgtttttgctatctatatatatccgatgcatcattattaggtcagcactaaatctcccttctaaaaaaaactggaacatttaacaaagatcttaattcattagaaaaagggttcactctgggttttattattttgcatcaaaccatgtcattgtttttattgagatgcataagtaattactcgtgtgtcgtagtaaatctatcaattacattgctatttattttcgagatattagtctatagccatgtactcttatccaacattttccaagattttgggatttactccgtaaaaagaaaattgtgtgtgtggatagtgattccatactgcttactagatgtacagatgtatttaaacagaatttttgaaaaatcatttatactcatgccatgcaagcagcaaaagtacatgaatgggatggaagatactaaggccacgtttggttccattagtcatatgactaaagtttaatccatagactaatttttagtccctaccctgtttggttgtagggactaaacatattctaaacacattaaatacaacacataaagaccaaaatgcccctttttttgtttgacaccagttttattggaagagtaattggagtaaatgttgcactttagtcccttttagcacccatgtgagggactagagactaaagccaattagtccctattttagtccgtctatttggtaaaatagagactaaacaggactaaaaaaacagagactaaagattagtctctctaaccaaacagggcctaatttccctcgagtctggaaggaattaataatttaaaacaacaaaagcacactatgtaaccttcatttcatcttttagttttttttaatttacaaaaggatgaaatgaaggtgatacgccggcaatctttttattgtaaacattcatttttggtcttgaatttctatattttcccttcaaagaatctacaaatagtagttttgattattttagcaaacggaaacagtgaaaatacttctgacaaacacaataacatatatagtaaataagaaccgtcctacacatatgatacactcatgatgacaaccattttgaaaagaatggacttgaggacacatttcagctcgatcagttcctatacactccattgctgaaaatgtatctttgcttgtatttttttgatttcacctctttatacaagttgctcaacatgcaattattttctgatttaataaatgtatcgacacaattattaactttctaatttgatggcccctgcattaatgtttcaatttgctattaggcgcgcacacacgttagcttttacctttcactaaccaattagcctaagaatttgtactgtgtgtagcagtgtacaacttttgtactgttggactcgtatttgataatgcttttggtattatttgctggtcaggagccacgcaatttgagagggactaacggccagtgtgtggccttagaaattgcatgggttaaaccaccctacattttgaagcgccaagtcatttttaaagtgaaactattacattattgtgcattcaaggattacacaaaataaaatatatgtacaataaattgttttgtgtgtttcttagtggtcctacatatatagcattttatgaccatatgtcacttctataaagaaaaaaaataagacaagcttaatattaattctttgactagctatatattaccgtttttacattacatgcatgtggcagggaggagattcagcgcatcaaagctgcgaagccagatatccctcacagggaggccttcagcatggctgccaagaatgtaagattcctggtcaatcataaccaattcttgaaagcattttgacctattttctctctaatgccgtgctgcatatgcagtgggcaaagtgtgacccgcgctgctcgacggctgcctctaccgaaacttctaacagcgctcctgctgagcctagagttgtgcccactccccagttaactgagccacgctttgacctggaggtactgcaaagccttctcccttcactcttctctgtagacaaataagcaagatttgaatatgctatgctatttcctatacgcacatgcatgcatgctgctcttgcaggatagggccaaggggcaagtcattgagagcttcgacatcttcaagcatattgagcgcagcatctagaggtcgttcgatgccgctgttgtagcccagtatcgatcgagtaccatcagctatatgtataacctatcccgtatcgccgtcgtcgcctcgcaatcatgcatccccatcctgtacttttacccccgtacgtgttactgttgctgttattctcgttatggttggattgtacgcaccatttaattatgaacagctgctacctatatatataatatttgccttcttttttgttcctaatatatgcatgtttacgaattattatccacctctagtatatatatgtagcgtgtgcattaatttgcattattatatcgtgtcgtttacttactgtaaccaataatgtagtatattcagagataaaattaaagttcgacttgttttgggtcagctgggtctcgactcaaatggcaatgccatgtctatttcatttagcatctagataaatgaactaataagatggcatgccatataacttagtagctgacccatgaaaaatagttatcaacccctactagcagtattacattgtttctatatatggtcggagggaataggccatagaagtggtcgttcaatatatgtagaagtgggtcttctttagatcacatgtgtagcaggctccaagatattaagggggtgtttggtttaaggaatcactacatctaaattgaggtggtgcatcatgggttcattactcaaatttggtggaatgacctcattcctaatattagtactaactaactaactatgatgaatgagttggtgatggatcaactcattccattccacaaaccaaacaaaaatagtgaggagtgagaagataatggactagctcattcctcaaaccaaacaccctataactttcttgttttctatattgcatgatctctccagtaaacaaacaggaggagattatttttgtcatgttaaacatattattactatttatattagttgtttagctaactacacaaaaatgatgatgtgatgattactaaaaaatgatgattctatactgtttttacgctttaaatttagctaaatggttcgtcaagccaaaatttggctactcaacaacaaaataactctccaacatactagtcatctaactcgccaagctatccgactctcaaaatgagctccctcactagccaaacttagctagccactctgactagccaaactagataaatagtcttccaaaaacatgatatgtatgtttagataaccatgacaaat

SEQ ID NO: 572 - protein, 205 aa, Zea mays
MDMVSQSEHLCYVRCTYCNTVLAVGVPCKRLMDTVTVKCGHCNNLSYLSPRPPMVQPLSPTDHPLGPFQCQGPCNDCRRNQPLPLASPSSTELSPRMPFVVKPPEKKHRLPSAYNRFMREEIQRIKAAKPDIPHREAFSMAAKNWAKCDPRCSTAASTETSNSAPAEPRVVPTPQLTEPRFDLEDRAKGQVIESFDIFKHIERSI

SEQ ID NO: 573 - DNA, 9930 bp, Zea mays
cgtgaaacctcgagggtcggctctgataccacttgtaacactgcgtccaatccctggaccggcggtacttactcctaacagctctctaggatcatatattgtccctacagaccaacacgagtcttttgtgcgtactttgtcctcactcgtgcgcatccgagaaaactttccggtcggtcaccatccaaaattgctccaagtcaaacacgcttaacttggaggttttttcgagacagacttctgaaaaaagaagatgcaccttgttggtatggatactttattaattttattaagccttgggccaggatatcaccatctcaggggccaggatatcacaaatttttatttcaataaaaatagtatgttgtgtggttttttagcgttgacataaatctacgtgaattacttaattctgaaatagaaaaccccgatgtggttgtgggtttagggtatagcctgttgcagactatgcacttgaacaataaggtcaagagtgcagtctggagctgacgtggtagagcaagaggggatggtgcactgacacccgcctaagcaaaagtttcctttcaatttgtagcaaaccaatatgttcaacgtgatccctatggtgtgtttggttgaagagttaactagaatgtgacagttttatttcaaagaatggagccattatgtcctatgtttggcaagcagaatatatgtgtttcattttttttgtctggttaaagagtaaaatattctttgtttggttagagatgcatatgattagggagggaacgagggggagagtcctcccgtccaaaagagcgctcctatccgattattttggtggaaaaaacattctaattatttatgatacatttttacctatagactttatgagccgttttatttctgttccattaaaaactaaacacccagaaaaaaaaacacctcctcgttccattctcgtccgtttctcgaccaaacacgctctctctcggcagcgatgcgagaacgtgcctttccttctcgctttcactggtaccaggtggcgaccatacagcacggaactccagttcaccgctgcctttcttctactgttcaccccgcgtgcgctcgctcactcgctctctcccctctggctctgagtggcgctagtgggcgaccgccgccgcgtccctccgtcaggtgcccaggtgtagcctcgtcagcccctccgtcaggtcttcgtcggccccctcgccgacgagcacccaccaggtacgcgcacccccctcttcttcgcttgcttccgtgcggaaccgagcacccgaaccctaacctaagctatttgcgtatttgtattcggatctgatctgatctaattgcaagcttataaatgtaccatgctctaacttcgtgtttttgcaaacattattgggcgtacatgtgtacacccatgtcctttactatatccgctccccagccaggcatgagagcgcgcttctagaataatgtctgtgcttacctgcgtgattgaaagcatgggctcatcctgtagcagatcccattctttcgacgaggctgaagcagctgaaaatgcaaaggtaacttgtcacttagaccaggctgatgctatcaggaggttatgattttgtgttggtaagcagcaacacttggttccttctgacattagcagtgtgggtgcagtctgcagacattgaccggaggattttgcaagaaacaaaagccgaacaacacatccacaagctcttacttctcggtaatgccaacttacttgaacttaagagcttttttttcttcttcatgtgaagtatatctgttctgtagttttctctcttgatagtttgctggatcagccaaaagaactgttgcgaagttgatccctagtcacttctctttccatgcattctagacttgataatgtgcctgtccattgataaggtactttgcctgtattcctaacagtcatcctccttttcaatcacttctttgtaaggtgctggagaatcggggaagtctacaatatttaaacaagtaaggtttatgccactccctagaggatcataattcttatgtcatcatcaagacagcaagtcacggatgtgtcttaccgctcattcgcagataaagcttcttttccaaactggctttgacgaggcagagcttaggagctacacatcagtcatccatgctaatgtgtatcagacaattaaagtatgctatactaaaaagggtgtgtctttttttttctatcacgttgtagagatgattatgtaggaaggtttcgttatggagtttcttgctgctccaatgagggtgtatttgcagatattttttctcagtaaatgagttaaacatgcacacgcagatattatatgagggagctaaagagttagcccaagtggaaccagattcttcaaaatatgtcttatctccagataatcaggtttgcacacttgccttcagaaattagagttaagttttggcaaacttggttattttgcaatgtaattgtcctggtgtggtcctgacacaattgctatggttgaacctgcctggagctgttataatccaaactgccttattatgctttgcacgattacatgctaacaaaatgagcatttgatcagagaaggcagctaggaaccttgcccctacattttattgcttcagagaaggcagctttagatttgctcaaatatttgttgtctcaaatgtttattatgcagtattcatctatgtcaagttatgagcatttgctttgtttgtagttatgaggttaaatagttaacaaatctcatcttggtagacgttgcaatgcgtttattagctcttagaagcttctcatagcacaccacacacatttttacttaattaccttttgtatatttgtattgtaactttattattaattcaggagattggagaaaaactatcagaaattggtgccagattggaatacccatcgttgaacaaagaacgtgtacaggatgtaagaaaactatggcaagatccagccattcaggtgaaattccatttactttgattttttttaaaaaatgtataaacttttaaacataaagtttgatcatttagaaattcatttgtaggaaacttattcacgtgggagtattctgcaagtcccagactgtgcacagtacttcatggaaaatttggacaaattatctgaagaagattatgtaccgacaaaggtacacaattatcctcaatctatttttaggagagattttacatatgcgttttacaatgtcacatatttcatgttgattgtcatggtactgaaatctaccttttgaggctatcagatagcagcagaacgagaacctagattaactatgaaatatttcttttgaagaccttaggagatcattagttaaattagagtatattatgcatgttagagtatattaggcaactcctgatatggttggtttaggattgattataatcctgggataaccttccttacatctgggataacctttcttatctctaggataggctttttgccctccaagtcatgtactcctatatattctccctagaggctcaatgcaatacatcccacacattatacacattctctccttccttcaaaatattcagtaaggaaacacatattataccttgcatataacaaggcagaatcgtcatgcccagttgcagtgcgtcaaggaaaaaaaactactaaactgcacagtgttattaaaactacgtttaaatgatgcttaaactacgtttaaacgtcaaaactctaattagaggttaaaaccacgttttagcgttttggcgttctaaactgtaaaacgcagtgttttatgcattttagaccattagctacttttgggcccagtctattagttacttttggggttcaatccagctcatgggtgaagttttggtaagccactaacctctctgttttggtatataacttcatattattgtctgaaattatgatgtattggtatctttcctatgttgtttaaaactacgtttaaaagtcaaaatttcacccatgaacgttctaacgttttatcgttttaataaccttgaaactgcaatatatcgggcttaattttatctgagtctctcaggcctcaagctcttgagtttccatgtggtcctctaccagaaacttttctttgctgaaaagacttccgattcctttgtcaacttccataacataagcttggtcacactagccaagttatttttcttcagcaatgatgttccctcctctcaagcaaataaaggtggtgttaaattatatttatgtatttgaataatagtagcacattaggaacagcctctaaagtgatagtatatgctgcggaggattcaaaaacacagcccccgcgtcgtcctccgctcgggcgacacgggtggcccctaaaccctagcgtcgccacccccttcccctccctccccctcgtcgtcgccggaggagtctacccgaagtcggcgcgggccccaaggatggcggtggcggggcgttcttccttcgattggtctccccgtgctcaaatctgaggtctgagtgggtttctgtgtcgggcggtttagtcgcggcgcagcagtaggcgggctcgcgtagtggcggcgtctaggcagtcaaggtccccgcgcgggtgtggcgctgtgcgtgcggcctcgtggcttggccacgttccggcgctccgcgatctcgaccactgtctctaggacggcagcggaaggatggcagagggaggtgctggcagcaggctgttctaggcgccagtggttctgtctctgtactggcagatccttcaggcggttttctcgccagtgctgccgctggggctcacggtgcggctggcagagaaggcagagtgtcgagccttcttcctcttcggtgccgaggacaagtcgctccacttcttccgggacctcgtcgtggctgggcatcacacgcttggtcctcaacagcggtcgcctcctgttgtgagacgattgaggagcgtagagcttgtctcctcgcactgccaggacgccggatcggggaagaagcgttgccaaccaacggcgtgcggagctcggaggctgagaggtgttggggcggtgatggctgcggtctggtcctacgatggtgctccgaggttgggtggctcgacagcgtccaagtgtgtgtcggtttggggcgacggtggactagcggggtggccccagcggcgcctgctgtggtgcgcgcgccaagatctgccatgtcgcggttgctgctgtcaagtcgggccgacggagggtgcagcaccaggtgctgttggaggcgagttgtgtggcactcgtgctcgatgtctgctggcttcggtggccgcgtctgccggtattggctccggcgtgcgtcggtgtgtcgcatgcgacatggtggtgctcggttccgtgtgcccaaccggagggggggtggccgacgcagctttgtggctgctgcgaagtcgacgcgtcgctgcccctctggaggggtttgtgtgggttgttagatcaacgatgacgacagaggttgcttgctttgatccggggtcttggcctgacgttgtgctgggggacttcttgggtgaaagtctcggcgacggtggcacccgcgggcttcgctttccctgttgagggctttgcattccccagcactatcttccttgggcgaaagcccggtccatctcggacatgcgacggtgcgtccgtgatgtcactccctccctgaaggcgtcgctgttgaagttttgtctcgaccatggtgttgcctttcggttgatgcttttgcttctcggcgttcggtatgcgggtgaaggtttggtgttgcagcgtgaagtcgaagctgctacgtcagtggatgtggctcgacaacgatgacgtgaggcgaaatcccccttcttcattgacaggattgcgtcgaaggttgggcatatgcctggggcagggcggaggatcaagattggaagtcaagttggtgaagaatcggagttgtatcacgtgaggtatcttgatgcttggcaacgacggcgcactgcggtcttccttcttctgtgtcggagtttgggtgtagacatcatcaggtttttctttggccttaggttgtccgtcttggggagtcgaagctgctcgttctttgtgttgagctcggcaacgatgactctggatgggctttgtgtgtggggctgctgctgtctaggttgcttgtgcaccctgtgtaggttttgggcccggttttccttaaaattgggccaattccactcttcctcttaattgagaggtagagctcctgccattacgttaaaaaaggaacaacctctaaagtaacatggaatcatctcgttcgtgatctgtcatgatactctttgtggatattttcctaaaggcatttcttgatcgatcatatatgctacttgtgtaatatttttttctcgaacgcgctagagaggtgcacatcattacattaagaagaaaaagggtccaaaatggaccagtacaagtacaagaaaaaacaaccaccttacggtggccaaaaacgaaaatacagaaaaacgtccatacaacaccaagagaactaccgctttatagcccaggaattggagctgttagaagagagaggctcttggcccctgccatatcccacaactccctctcttcctcagcccttctaatggcaacatttacattggagtgatcttgtcaaagacgcagccgttcctatggttccagatggtccagaaaccaagaattattaaggaattgagtcccttttctgctatgccttgcacctgttcgctcatccttctccaccattccatggccttcccttcccctggctgaggagcaagtccttgaagattgacctgtcccagcaatctgcaccaaaattcccttgcgaaaacacagccaactagtaggtggtcaattgattcaggatcttgatcacaaaatgggcattttgcaggatgttcaagccctcttttttgcagccggtctgctgtccagcatctctgaagggcagcaagccaaggaagaacttgcatttcggggggggggcacgatttccaaatcttatcactaggttcaaactgaattgatccaatgaaaaggttctcataagcagctttggctgagtataagctaattgtgtaatatcaatagggttttgctggtctgaacatcaaattctgtctgaattggaatccagtcatcctcatgccatatggaaatttaaacttatattttgttttaatttcctttcatgtgggtatttcatgatatctatttctgttactacctggttatttgaggaggtcggaaaaggcttgtacttgatttgtatatttgataatttatttgcgctacttgacaagggctgattttcaggaggatgtgcttcatgcaagagtacggacaaatggtgtggtagaaactcagtttaggtattccttggttatgctatttgcttattattagttagatataactctaataatcagtttttttccctgcagccctctaggagagagcaaaagaggcggagaggtctataggctgtacgatgtaggaggccagagaaacgagagaaggaaatggatccatcttttcgaaggtgttaatgctgtaatattctgtgctgccattagcgagtaagcccagtttccttgtttgcacttgattggcttgaacttaactgtaatgacaaattgtactcagaagctgtttttttccttcagattttgtttgggtgctgcaaaaattaattatagctgcctctaagtcactaaaactaattgattttccatgatcagaacatctgttctgttactgatgctatccagttctattctgagtgccttttataataattgtatttcaattgaaataaatttgtatttttgtatgtttggggcacttgacaggtatgatcagatgttatttgaggatgagacaaagaacagaatgatggagactaaagaactctttgattgggtgctaaagcaaagatgttttgaggtttgtatcataatcatcacaacgtctgttctcatactatctttttatcattaagagacctacctgatgcaattttgactttcagaaaacctcattcatgttatttcttaacaaatttgacatatttgagagaaaaatacaaaaggtaactagtgcgcttctttacctattgagagatgagtataatacactaattcacacatatgaataacactaattctccttatgtaggtccctttaagcgtgtgcgagtggtttaaagattaccagcccactgcacctggcaaacaggaggtggaacacgcctacgagtgagtgtgatcctgtcatcctgtgtctccctatggcttgtcagtatcatataaagatgcatatgcgcacatagatgccacattaagttttccactttgttgtcatctttacgtgctggttttgggtcttaaattcttaatattgaccaggggatcatttttttaggtttgtaaaaaagaagtttgaggagctctacttccaaagcagcaagcctgaccgtgtcgaccgagtgttcaagatctacagaacaacagccctggatcagaaacttgtaaagaagacattcaagctgatcgacgagagcatgaggcgttccagagaaggaacttgatcgaggatgtggtgttataagccacaagacaagtaactaggatggtgtgaggagcagaaagtttacagtgtcgcggctttggccgattgtgattctttttacatgaggaacatttgttgatctttttgccccaccacaagccagtaaaagtatctgttttgcgctggtcttggggaggtttgggtcgtctccatttccccccaatgttaggacaaaatgtacttaccatcttttggagctctgcctgtttggcctcacaatatcaagttcattcgttgttgtctatgcagcatgcctattcacgaattgtctgaatttgttaaccaacaacagatgaaagttcgattggtactctctcaagactgaatttggctacgcatcgcgatcacactatcggaattcaagaaagctgaccgaaagtgctacacatacatgcagcagaaagcacagccctcaccgccaaagcattacaaagcacaaaaaccatttgaagaaagctccgcaacgccaacgcattacaacgcacaaaaaccatttgaagctctgaagcaacgtggtgaaccaaaggggcgaactctgcatgcggcattgacagagtttgcattcgatggctagagagcgaggagcatgcatgtccaacacattgctgtgcagatctcgagcgtctgatgcgaagcatgatccccagctggtaacaataaggcatttgacgaacccagccacaagctcacatgcctagtgaccaccatcttctccctgtgatgtctttgatcgcattctccgcatccatttcctctggttgggactgggagtcgccgagctggatgaagcagcagtcctctggtggtgctgcgccgctgccgagctcgggagctccgccggaagcgcggccgccgtgctggtgaaggcgttgaggacgaggaaagcgaggatcggcgacaggtccagcgttcccccgagcggcgggatgatgccccggaagatgttcaggtacgggtcacatatcgtgctgcattgcattgccatcgtttgaactttttgacgaaagaagtgtcacactgtcatatgctagtttcggaaatgtaggttgtgaaatcatctcgttttctagcgacccagctggagctctccactctaaatctcagttcttgaactacatcaatagggaagcgtagcatgtactacctaccagagctgcgatggcgcctacctgagaggcgcgacgatggcgggcggcgtgttggggaaccacgtgagcacgagcctgacgacgagcaccgtgt

SEQ ID NO: 574 - protein, 390 aa, Zea mays
MSVLTCVIESMGSSCSRSHSFDEAEAAENAKSADIDRRILQETKAEQHIHKLLLLGAGESGKSTIFKQIKLLFQTGFDEAELRSYTSVIHANVYQTIKILYEGAKELAQVEPDSSKYVLSPDNQEIGEKLSEIGARLEYPSLNKERVQDVRKLWQDPAIQETYSRGSILQVPDCAQYFMENLDKLSEEDYVPTKEDVLHARVRTNGVVETQFSPLGESKRGGEVYRLYDVGGQRNERRKWIHLFEGVNAVIFCAAISEYDQMLFEDETKNRMMETKELFDWVLKQRCFEKTSFMLFLNKFDIFERKIQKVPLSVCEWFKDYQPTAPGKQEVEHAYEFVKKKFEELYFQSSKPDRVDRVFKIYRTTALDQKLVKKTFKLIDESMRRSREGT

SEQ ID NO: 575 - DNA, 9226 bp, Zea mays
tggctggggtttcctgtactaatggaagccctggactttcattaactcctctctctctctctctctctctctctatatatatatatatatatatatatatatatatatatatatatatatatatatatatatatatatatatatatatatatatatatatatatatatatatatatatatatgtgtgtggtgcctttctttcaaaacatattatgcaacgcgtaccgtatctcaacaaacaccttcaataagttgagtcggggtagatctcaaggctacataaaatagttttttttctagaatggatgcatttgttttaagagaaaaatgatgcacttggaatgcatcaagcaaagggatgtaagaatgttggaaaaacacatgaacccgtatcgcgagatgcttatttatccattctttatcacagtggatgcatatgcaacaaaaccaaaacagatggttagcgagtgacagtatatagagatctaaagttgtccgacacttcatcggtaaaaaaagcagcataaccgagtgaatggaagaaaaacgaatttctcatatacacagcaggttttcttaaaaaacgttatatcggtattatattaagaagagaccaaaatatggtcctgtcgagaaaatttctaaacattagttctcatcaccagtgagccgtcaccatctagtttgcaacggtccagttagagtgcactcaggactcgcagcgagagaatttttttaatcaagcctaaaattcactttcggacaaatcgaactactcataaatattaaccatgagaccttttcgccgcagcaggttttctatcggccgttagattttagtgacgatgaaaatgatagaacgcaacgtgccgcatgcatccattcccattcgttttccacagtacatgtaggagtactgtgcaagtagggtccgtacattcagtctctctcactagttggactcttctactgctacaaagacatgagctgccgggaatgggaaccggaggagcgagcgagcctgacggtctcacacacacagtcacactcccaagccaattattataagaggcgagatgagcaactccagctcttaaccaatccactcctcctccctctccacctcctctgctttgctctgccactctgctgaggtggggggcagaggagctccccctccctcctctcccctcctcgccatgtctagcagcgacccggaggagatcagggcgcgcgtcgtcgttctcggttcgccccatgccgacggcggcgacgagtgggcccggcccgagctcgaggccttccatctgccgtctcccgcccaccagcctcctggcttcctagccgggcaaccggaagcagcagagcaacccacgctccctgctcctgctggccgcagcagcagcagcagcaacacgcctactacatctgccggtggcggcgctgctcctcctcctccttcttcgcctccccctccgccggcttctctggagaccgagcagccgcccaatgccaggccagcctccgccggcgccaatgacagcaagaagcccaccccgcccgccgccctgcgcgacctcttccgcttcgccgacggcctcgactgcgcgctcatgctcatcggcaccctcggcgcgctcgtccacggctgctcgctccccgtcttcctccgcttcttcgccgacctcgtcgactccttcggctcccacgccgacgacccggacaccatggtccgcctcgtcgtcaagtacgccttctacttcctcgtcgtcggagcggcaatctgggcatcctcgtgggcaggtacgctatccctcctcctcctgccgccccagcttgtgtgcgtcgcgaattggcggtcaatttggattggatgacaaatcacgtcggtcagccaatcgccgtggctacaaacgagatgttcaaatcgttcgccccgctcgcagagatctcttgctggatgtggaccggcgagcggcagtcgacgcggatgcggatccggtacctggacgcggcgctgcggcaggacgtgtccttcttcgacaccgacgtgcgggcctcggacgtgatctacgccatcaacgcggacgccgtggtggtgcaggacgccatcagcgagaagctgggcaacctcatccactacatggccaccttcgtggccggcttcgtcgtggggttcacggccgcgtggcagctggcgctggtcacgctggccgtggtgccgctcatcgccgtcatcggcgggctgagcgccgccgcgctcgccaagctctcgtcccgcagccaggacgcgctctcgggcgccagcggcatcgcggagcaggcgctcgcgcagatacggatcgtgcaggcgttcgttggcgaggagcgcgagatgcgggcctactcggcggcgctggccgtggcgcagaggatcggctaccgcagcggcttcgccaaggggctcggcctcggcggcacctacttcaccgtcttctgctgctacgggctcctgctctggtacggcggccacctcgtgcgcgcccagcacaccaacggcgggctcgccatcgccaccatgttctccgtcatgatcggcggactgtaaggcccaccacaccacgcactctctccttctgctgctcctcggcccgcccccgtcgtcattgctgctgacggtatctgtggatcgcgtgcagggccctcgggcagtcggcgccgagcatggccgcgttcgccaaggcgcgtgtggcggctgccaagatcttccgcatcatcgaccacaggccgggcatctcctcgcgcgacggcgcggagccagagtcggtgacggggcgggtggagatgcggggcgtggacttcgcgtacccgtcgcggccggacgtccccatcctgcgcggcttctcgctgagcgtgcccgccgggaagaccatcgcgctggtgggcagctccggctccgggaagagcacggtggtgtcgctcatcgagagattctacgaccccagcgcaggtatacctagtactgttactacttttagcgcattaatctgaggatgtccagttcgcttgcttgccaatcgccattgccatcgcaacaacaatacttcgccaactgccattgctgggtagactagtacagtagcagttagaagaagcctccactgtacattgcattgccaaacaaaagtgaattgtgcagtaactctgtaccaccacattgacatggaaatgaagtgaatgcttggagcatgcagagctggccggcctcatgggctgctgctacctgctagctagccaaccagaaccagccatcctctttcttgcttttctttttactttctttggtcgtggctgtttgtggtcatacatacattcacgcagagcagaagagctagctaagctaggtgggtgtgcctgcaacgcgggacaaagaaaactatttgttgcctggcaagatgctactgttgcctagcacatgcctgccattgaccgactgctcagtgagaagtggttcagttgtgctgttgacagtatagatagatatatatagtagccctgtagatttttttttcagacaaaaaaagaagaagaacgagatgaagtctgcaattcggttttggcagggcaaatcctgctggacgggcacgacctcaggtcgctggagctgcggtggctgcggcggcagatcgggctggtgagccaggagccggcgctgttcgcgacgagcatcagggagaacctgctgctggggcgggacagccagagcgcgacgctggcggagatggaggaggcggccagggtggccaacgcccactccttcatcatcaaactccccgacggctacgacacgcaggtccgtcccgtatagctagctcactagctgcactgccacttctctcgcttgctccccaccgttgctgcctgttgctctccaatccacttgtcggtgtctggaccacacgtgcctgcttgcctagctgctccacatctgctttccctgtccaaccttatgcaactcactctaatactatatcaaatacatttctagagtttaaagcttatcttagaataaatgcatctttagctacgagacaacctaacttcagttgttgttgttgttttttttactttctctcttctcacaaatactatgattacgtctttacagcgatcttttttattccaaacctaaaaatgcatgcactcactctaaaagcgcaaagggagcatctttttttcccccatcatctgcacgcagccttttcttttcctcatgtcacgagggactgaaggtgtgtatgcagcgtcaagtcatccatccgttccactccactcactcatgcgtcgcgcactctgcgctcgtgcctgcccggggctaaagctttagtagctagcctcagatcagatactgttcgtgtttgttaggccgcggcagctgcacatgagctcatgacagccggcagcaccaccaccaacgccatggaagaggggtcggggtccatcacatagacatagatgcctgttgtagactaggacgggagggcaattgttaggcgcctgttgccatcgcatttgctgctgtgggttgccaacaagtaacatgccaggatgctttgctatcacgcacaggacaggagaggtcctttttctcgacacaagctctacagcctctactaaactagcacttgctgatgagtgcagaggatgaatggacgatgaacatctagagtgagagagaaaaaaatgttaataataataaaaagtagtagcaggattaagaatcaacctggggtacgtaggaagaggtacaatccctaggaatctagagtatgagaagtatgggaggagttgggggagtgaaacggaacaaattccgagttggtattttgtcgggaatgtcaagttgatttttgatcctagtgcaagcaagaattatcaatcactcagactcagcctgtctgtgtctgtccaccccagctcttgctactctacttactactgtgctactagtggtagggtaggtatcttacataaactgttattataaactgtcatctgagaaagagagccagtcaaacccatgctgctgcttattttaatcactgtcaaatggcaggcaggcaggcagtctggttagttaataacatctgggaagggtttaatcaaaccaaatcaaatcagacgaaatctagaggccacatgggatggggccatatgtactgtactagcataactagcggctagattttattagaacacggactcacactcccataactataactgacttgatcatgattccttgccaagcaatgctcgcatgcccatgcatgcatcatccctggtcaaactcaaacactctccaccgtcagggaataagacttattattttattaacaattcaatttttatttattaattacgtctggacgaggagtactggtttatttgatgagagacatggcagtccaagtcaaactcgtttgtctgaccatggcggtgatggccggtgcaggttggggagcgcggcctgcagctctccggtgggcagaagcagcgcatcgccatcgcccgcgccatgctcaagaaccccgccatcctgctgctggacgaggccaccagcgcgctggactccgagtctgagaagctcgtgcaggaggcgctggaccgcttcatgatcgggcgcaccaccctggtgatcgcgcacaggctgtccaccatccgcaaggccgacgtggtggccgtgctgcagggcggcgccgtctccgagatgggcgcgcacgacgagctgatggccaagggcgagaacggcacctacgccaagctcatccgcatgcaggagcaggcgcacgaggcggcgctcgtcaacgcccgccgcagcagcgccaggccctccagcgcccgcaactccgtcagctcgcccatcatgacgcgcaactcctcctacggccgctccccctactcccgccgcctctccgacttctccacctccgacttcaccctctccatccacgacccgcaccaccaccaccggaccatggcggacaagcagctggcgttccgcgccggcgccagctccttcctgcgcctcgccaggatgaactcgcccgagtgggcctacgcgctcgccggctccatcggctccatggtctgcggctccttcagcgccatcttcgcctacatcctcagcgccgtgctcagcgtctactacgcgccggacccgcggtacatgaagcgcgagatcgcaaaatactgctacctgctcatcggcatgtcctccgcggcgctgctgttcaacacggtgcagcacgtgttctgggacacggtgggcgagaacctgaccaagcgggtgcgcgagaagatgttcgccgccgtgctccgcaacgagatcgcctggttcgacgcggacgagaacgccagcgcgcgcgtggccgccaggctagcgctggacgcccagaacgtgcgctccgccatcggggaccgcatctccgtcatcgtccagaactcggcgctgatgctggtggcctgcaccgcggggttcgtcctccagtggcgcctcgcgctcgtgctcctcgccgtgttcccgctcgtcgtgggcgccaccgtgctgcagaagatgttcatgaagggcttctcgggggacctggaggccgcgcacgccagggccacgcagatcgcgggcgaggccgtggccaacctgcgcaccgtggccgcgttcaacgcggagcgcaagatcacggggctgttcgaggccaacctgcgcggcccgctccggcgctgcttctggaaggggcagatcgccggcagcggctacggcgtggcgcagttcctgctgtacgcgtcctacgcgctggggctgtggtacgcggcgtggctggtgaagcacggcgtgtccgacttctcgcgcaccatccgcgtgttcatggtgctgatggtgtccgcgaacggcgccgccgagacgctgacgctggcgccggacttcatcaagggcgggcgcgcgatgcggtcggtgttcgagacgatcgaccgcaagacggaggtggagcccgacgacgtggacgcggcgccggtgccggagcggccgaggggcgaggtggagctgaagcacgtggacttctcgtacccgtcgcggccggacatccaggtgttccgcgacctgagcctccgtgcgcgcgccgggaagacgctggcgctggtggggccgagcgggtgcggcaagagctcggtgctggctctggtgcagcggttctacgagcccacgtccgggcgcgtgctcctggacggcaaggacgtgcgcaagtacaacctgcgggcgctgcggcgcgtggtggcggtggtaccgcaggagccgttcctgttcgcggcgagcatccacgagaacatcgcgtacgggcgcgagggcgcgacggaggcggaggtggtggaggcggcggcgcaggcgaacgcgcaccggttcatcgcggcgctgccggaggggtaccggacgcaggtgggcgagcgcggggtgcagctgtcgggggggcagcggcagcggatcgcgatcgcgcgcgcgctggtgaagcaggcggccatcgtgctgctggacgaggcgaccagcgcgctggacgccgagtcggagcggtgcgtgcaggaggcgctggagcgcgcggggtccgggcgcaccaccatcgtggtggcgcaccggctggccacggtgcgcggcgcgcacaccatcgcggtcatcgacgacggcaaggtggcggagcaggggtcgcactcgcacctgctcaagcaccatcccgacgggtgctacgcgcggatgctgcagctgcagcggctgacgggcgcggcggccgggcccgggccgtcgacctcgtgcaacggggccgcgtaggacggaatggatggatggatgggtttggttcctcgagagattgatgggtgaggaagctgaagctccggatcaaatggtggtactccatgatcgcaacaatgaggggaaaaaaagaaaggagaaaatacggtggttcatatgattgtacaatttgacgatctgtttgagtcggggttttaggatgatgtaaaccttcactcgccttttttttactcttgtttctcatccgcatcagtatcatctatctacatacagtgtcagagatgggaactgatccgcatcatcatctacctcccaaggcaccccagattgtattaatgtacttagttagcctgttttatatatacttataagtaccaaatagcagaattttactccttatctgcagtagcacgaaagaagaaacggcaagctacacctatctctggaagcaaaagaatctccccattctctctcttcctacgaggacaccccatccttttcagacagacagacagacggaccaaactgcaccacccaagaaccgatcgagagcagaggtagcattctctgcactgtagagtgtagaccatactacgctgctctcgagacatgatcccgggaatatctaccgaattgtttgtcagtggcatagccgcatagctctcagctgcctaatgaattgtttggtgccaaccgcgctgcaggcttgcagacgacccgggaagggtcagggattgcacaactactagcatcagtggagagcgaaaggccagaacggcaggcttgcaggaaaacagggaccgtgagtttgacctggccttgggggtggggagtcagtcagtcacatgcgatgcgatgcagtggaggaacccatcttccaacgcacgcggcacgccgtgacaccgattgatttcagggttgctttcgccgctgccaatccaccgatccctggaccctggtgcgttgttccttcgtcgcacatgacggtgcgccccaaccgcagcgcgctggctggcacggagaagggatggattggccgattggggatcggtgcatgctcccttgctcatgaagacggacgaactgcgcaaggccggacccggacccggacgggacggaggagtaggaccatggctgcctgggcctgggcctgggctcacagacagcacggaaaagaggtctgcgctgtccgtccctatctccccggtccaaatctcgagcgccgatgatgcgtccccaatctagccagccagcctatgcctatcctcggcaaccttgtcactgccatttcaccgctcgccaggcactgttgtcttgtcactgttgcctggcgacgcaacacaaccaggcgtctcctctagtcctctactcctctctctgcaacccaaacac

SEQ ID NO: 576 - protein, 316 aa, Zea mays
MVLMVSANGAAETLTLAPDFIKGGRAMRSVFETIDRKTEVEPDDVDAAPVPERPRGEVELKHVDFSYPSRPDIQVFRDLSLRARAGKTLALVGPSGCGKSSVLALVQRFYEPTSGRVLLDGKDVRKYNLRALRRVVAVVPQEPFLFAASIHENIAYGREGATEAEVVEAAAQASAHRFIAALPEGYRTQVGERGVQLSGGQRQRIAIARALVKQAAIVLLDEATSALDAESERCVQEALERAGSGRTTIVVAHRLATVRGAHTIAVIDDGKVAEQGSHSHLLKHHPDGCYARMLQLQRLTGAAAGPGPSTSCNGAA

SEQ ID NO: 577 - DNA, 7285 bp, Zea mays
aaatacattacggatatatatatggttccagttggcccgggacacaatccaaaaccgaaacggatgaagttttacacgaagaaaacccaatatgctgaaaacaacaacgacttaaccaaaaggtagacctcacctcagatatatacaaactgaacaggtcaccatcccggtttgccttgatgtcttttcttcccatgtaatacaatatatattccatttaagggctagtttgaaaacttcattttctcaaggtattcctatttttccaaaagaaaatattaaattttcttaagaaaataaaaatattatagaaaaatggggttccaaactagccctaaaatagtcacacaaggaatattacgagtgtcgtatatgcatgctagtttatgtgcatttattttaggacggaagtcgtctatgtttttagtccaaattaataagtaaaactgaaatacattcaatatatatacccacaacttcaggcccaagaatttgtagggttcagggacgacgagcagttccaaaaaaaaattggagctttagttgtgccacaaacagtcccctatccctatacatacgtccaaactaaattgaaggacttcgagtcatcaaattgatcgatcgatcgatcgccctttattggagcgatcgcagtagagctgagatgatatatatatctgttcatcaatcacacgcgcacataggcactagtaccctgccacagggaggtagcagcagtggcggtggatcgatgagagaggcgcgtgattggatggacgcagcactccaacgtccaaccatgcgccccgatcgagatgatatgagcggcagggtgactgttcctttcccttgaggtgtacacttgcatgcatgagcgatcgagcgggagaccgatcactgtacaagggttaggccggccgtgtgcgcgtcttgcttgtctcgaaaagatttatggtgatgcaggccagctccgctcgcctgatcgtcgctgcgtggtaggtctcgtgtgtacggactaccccatgtgtgcgtggggcccaggcattattgcaggaatagaaaccctaccaccatctccgctcgtggcgtgctccactgattcttcttcttcttcttctacctcccggccggtctcctcccctttctttgtctgcctgtgcttattagtatctcgcctcaccacgcagctagctagcagacagccagacacgcgctgctttcagatatctcaccggaccgtcgtcgtcggcccctccgagaacataccaccgcgcccgccgccgcgcgcgccaccacgtccacgtacgccggccggccaccaagcaagcatggatacggtttcacagtccgagcacctgtgctacgtccgctgcacctactgcaacaccgtgctcgcggtaaactcctcgagaaatcggccggaccctaataatgaaacatctatcatataggccaggaagatcgtcatgagatgagacgatacggctagcaccagatatggcatttcttccgctcgtttttgctaaactcagacaacaagttttctgctacctggttcccatttttttctcttgcttttcttttctttcctggatatgtatatccttgctttatatcatgatggtggtagccagtgccgctgctatctctcattcatgtacatggcaaccaattaaaatccagcctttctctttcttgccttgagattggatgggcgcacacatatacatcctgacatgcatgactgatgtgccacacatgtttccttggagaggtacggtgtttcgttggctctttgttgattctttgtagaatattccgctcacgctgcttctcctgatagtgtgacatgttccgtctttacttctatgtatatatgtttggtgcttcgcaagctagggcttcaaatatcttctcttctttgttgttacatgcatactgaagttcaaactggacaagaatcttctgtttactctccggccgctgcctatatcgacttctagagctcatccctcagtttctttctcctcgagatttatattctgctactgctgcttcgatcgacagtgccatgtaaataggaaaggagttgatctgatttcatgctgtgattgattgattttgtgcttcttgggtagctgcaggttggggttccatgcaagaggctcatggacacggtgactgtcaagtgcggccactgcaacaacctctcctacctcagtccacggccccccatggtgcagccgctctcgccgactgatcatcccttggggccattccaggtgtagatcaatacagctcgctctttagttcgtcttctttgaatatgttagcttttttggagaatgaaaaaataataatatagatgatttcacaaatagatcaatggagttttctcatgaaatatggccatggatttgctttttttactttctcagctgcatccgtgtgctgctactttgctatctctctcctttattgaactactcaaagtactgtttgcaaggcaagattaaacaacgctggactacaaaagatttctttttgctcatctctctgcgcgcggcctggggaagccgtcgctcgttgctgcaaaaggcagtgttgagcttttttgaggcggcagggagctagcagcagctgctctgctctgctgcagcattcatgcatgcacggttctcctataacacattttcttttggacataaagatcttggtatccttgaccagatttgatggccatgtaaacaataactaggaaatgattccatcacgtatcatgatagattcatcggtaacgccgtgagatgttgaagcgctgggacctgtccttgatcgctatgctgccatttctcagtgtcagggaccctgcagtgagtgcaggaggaaccaaccgctgccgctggcctcgccgacatcgactgacctcaccccgagaatgcccttcgttgtcaagcgtaagtagcagcagcaagaagcaccatcattttgactgttccttgtacctttgttgctttgttttttttttctgttcttaggtgattttttaagaaaactttcttctcaaactctatctatccctcctgtgttagttgatgtgattgagtaagatgaacagtagttaaggttgttcttgtactcaatgcatttgttttatctttcattgcagccccggagaagaaacatcgcctcccatctgcttacaatcgcttcatgaggtgaagagacatttgttttcttttctttttaaatttttgcaaatacattgtttggaataatagtttttcaaacatatctggtctcaaatagtttcatgtgatctcaccgtgcttgttggagtcaagttggtatctctctatgtatttagaaatctgatttacttgtaatgcctgctccaaactctgaactaattaagggcctgtttggatcccagtaactaaagcacaagtgacttaagtttagtcgtttttgctttagctcctgtattcaaacaggtcctaggttcatgaaaaagttgaactaaaatgggtttgaatccaccatatatggatacctcactctccgccccttacacactttcccctaacaagctaggctacataagcctgagtattactattttcacaatagctgaagacaatgcttaaaatgtgacatgaactttctcctggatccgtcagccagccaagtttacaaatactccaacgcatatcatttttttacaagtactcaagtactagtcaagtaggatagtaggagctccgatccgaacgcagcagtaactagctaaaccgtgtgaatgtatatatatatatatagttcacacattgtttttgctatatacccgatgcatcattgttaggtcggcactaaacctcttctaaaaaaatctagaggaactgtgaagtgcaaccatttaagaatgatctcatttattactcccctgttccaaaatagtagtcgttttagctctaaatttttatgtctatatttatatggatgataacgaatctaaacatatatatatatagaacacatatattatttattatatgaatctactaaaagggtaaaacgatttttaatttgcattgggacagagggagtattagaaaaaggttcactctgggttttattattttgcatcaaactatgtcattgctttatgttgaggtccataagtttgtgctcttagtagatatatatccctccatcccaggatataaattaagcgtaactaactctggtttaaagacaaaaaatatatttattttttcctttcaacactagtactactaattcgatatacatgcctctagagatagcgcgtctatatcatgaaacaagaataaaaaatggttatgcattattatattagcggcggagggagtatagccgttccattactatgtattttctagatatatattagtctagccagatacttttatccaaccttttccaagattacagcagttgggatttagaaagtaaatgtctggatagtgattccatactggttactggttgtacaatgaatttaaacagaactttagaacaatcaatacactcatgccatgcaagcaaacatactgggacgatggaatggaagatactaatttcccttgaatctggaagaataagaaaagacaacacaagcacactatataacctttatttcatcttatatacagggatgaaatcaaggtgatactactatgtaatcttcattgcattgtaaacattcattttgggtcttgaatttctatatttttccctcaaatattctatgagaagtagtagatttgattatttttagaaaatagaaaataaacgaaaactacttgtcacaaaccaatagcatacaacaaataagaactgccccatacacataatacagactcatgaggatagacattttgaaaagactggacttaatgacacgttccgcctgagatcttatacactgcattattgctgaatagttatgattgcttacattattatttgtagtttcacctctttactaatcgctcaacatgaaatttatttttaaaatttaataattgtatcgacacaattactaataatagttgaatttgatgttccgtccctgcgtttttgtttaaatttgctattaggcacacacacacttcaagatttgaacccttcattaaccaattagcctaaaaatttgtacaccgtagtgtacgacttttgtaccattgagctcgtatttgataatgcttttgtacagtattatttgttggtcatgaacaataatgcgatttgagaggaattaacggccagaggtcttattagaaattgcatgggtcaaaaaccaccgtacattttgaagcggcagggggtcatttttaaagtgaaactattacattgttgtgcatttgtatgattacacaaaataaaatatctgtacaataaaatattttctttgtttcttttagaggtcgtatacatattacattttgtgaaccatatctctcttctgtaaagaaaaatcaagacaggcttgattttccttattgactagatatatatgttaccctttacattacatgcttatgcggcagggaggagattcagcgcatcaaagctgcgaagccagatatccctcacagggaggccttcagcatggctgccaagaatgtgagattgcttcttggttctaactaattcttgaaagcaattttttttacatatcttttctctatatatatgcatgcatgcagtgggcgaagtgtgacccgcgctgctcgacgactgcctctactgccacttctaacagcgctcctgagcctgctagagtcgtcgtgcccactcctcatgtaactgagccacgctttgatctggaggtactgcagaactactaggccgtctctcttgatcttctctatacatttatatagaggcagataagaaataaagactccaatatgctatgctatttcttactacgtacatgcatgcatgcataatgctgctcttgcaggatagggccaaggagcatgtcattgagagcttcgacatcttcaagcagattgagcgcaacatctagatgtctccatttcgagtaccatcagctctatatataacctatgcatgcatatgcatccccatcttgtactttttacccccatgttactgttgctattattcttgctcttgttggattgtacgcaccctttaattgacagttgctaccctatataatgtttgccatcttatatattgtcgtcgttccttatatagggttatgatcgatatatatgtagtgtgtgcaataatttgcattatattgtgttgaattaactgaaacaaaatgcagtgtttagtgacaaaataataaactaatactcctccgttccaatttataattcgtttgaactttttatcctatgtttgaccgactcgtcttatccaaaaataataatcacaattattataattttttactctagtattgtttagcatataatatacgttaaatttggctttgatttttcagtttttcacggaaaattttgaataagacgaggagtggcggatctacatccggggccacccggtccgtggcccggggcttgatccatgtaactctatataagtctccatttaatacggtataaaatagttaagataaaatgaaaagaagaaaatttgatagatttggcccgagtcaaagaaaaattctggatccgcccctgaagacgagccagtcaagctcggtcgataaaagtcaaacgaattataaattgggacgcatcatgcgtgtatatatggatggaggagtatatgtcatagaaatcatctttcaatatatgtagagtaggtacttttttagatcacatgtgtagcagattctaagatattaattttcttattttctatatcgcatgacctgtcaactaaaaaaacagggggcaatatttttattatgttaaacatatcattactatttatactagttgcattgtttggctaacctcacaaaaaattgatgtgatgattattttacaaaatgagtccatagtgcttttaggtcttaaaatatatcaccatgcatacaggtgatgatcttaattacatttagtagacaaattttatgcaaagcgacactagattatttttgatgagctaggtagaataagtatagtttgatctatatgtatgcatgcatgcaatattgcatgacagaataataatgcaatgacataacaattgaattccataagaaactcaggtataaataatagtaatgatggaa

SEQ ID NO: 578 - protein, 206 aa, Zea mays
MDTVSQSEHLCYVRCTYCNTVLAVGVPCKRLMDTVTVKCGHCNNLSYLSPRPPMVQPLSPTDHPLGPFQCQGPCSECRRNQPLPLASPTSTDLTPRMPFVVKPPEKKHRLPSAYNRFMREEIQRIKAAKPDIPHREAFSMAAKNWAKCDPRCSTTASTATSNSAPEPARVVVPTPHVTEPRFDLEDRAKEHVIESFDIFKQIERNI

SEQ ID NO: 579 - DNA, 5314 bp, Zea mays
  misc_feature (1)..(994): n is a, c, g, or t
nnnnnnnnnnnnnnnnnnnnnnnnnnnnnnnnnnnnnnnnnnnnnnnnnnnnnnnnnnnnnnnnnnnnnnnnnnnnnnnnnnnnnnnnnnnnnnnnnnnnnnnnnnnnnnnnnnnnnnnnnnnnnnnnnnnnnnnnnnnnnnnnnnnnnnnnnnnnnnnnnnnnnnnnnnnnnnnnnnnnnnnnnnnnnnnnnnnnnnnnnnnnnnnnnnnnnnnnnnnnnnnnnnnnnnnnnnnnnnnnnnnnnnnnnnnnnnnnnnnnnnnnnnnnnnnnnnnnnnnnnnnnnnnnnnnnnnnnnnnnnnnnnnnnnnnnnnnnnnnnnnnnnnnnnnnnnnnnnnnnnnnnnnnnnnnnnnnnnnnnnnnnnnnnnnnnnnnnnnnnnnnnnnnnnnnnnnnnnnnnnnnnnnnnnnnnnnnnnnnnnnnnnnnnnnnnnnnnnnnnnnnnnnnnnnnnnnnnnnnnnnnnnnnnnnnnnnnnnnnnnnnnnnnnnnnnnnnnnnnnnnnnnnnnnnnnnnnnnnnnnnnnnnnnnnnnnnnnnnnnnnnnnnnnnnnnnnnnnnnnnnnnnnnnnnnnnnnnnnnnnnnnnnnnnnnnnnnnnnnnnnnnnnnnnnnnnnnnnnnnnnnnnnnnnnnnnnnnnnnnnnnnnnnnnnnnnnnnnnnnnnnnnnnnnnnnnnnnnnnnnnnnnnnnnnnnnnnnnnnnnnnnnnnnnnnnnnnnnnnnnnnnnnnnnnnnnnnnnnnnnnnnnnnnnnnnnnnnnnnnnnnnnnnnnnnnnnnnnnnnnnnnnnnnnnnnnnnnnnnnnnnnnnnnnnnnnnnnnnnnnnnnnnnnnnnnnnnnnnnnnnnnnnnnnnnnnnnnnnnnnnnnnnnnnnnnnnnnnnnnnnnnnnnnnnnnnnnnnnnnnnnnnnnnnnnnnnnnnnnnnnnnnnnnnnnnnnnnnnnnnnnnnnnnnnnnnnnnnnnnnnnnnnnnnnnnnnnnnnnnnnnnnnnnnnnnnntcgccaccacaccacaacgccacaatcacaatgcctcctcccaccttcctcctcggcctcctcctcctcctcctcctcgccgccgccgcccccgcccccgcctccgccacgccggagcgggacgcgtacgcgctgtcgaggctcaaggcgtcgctcgtcccgtccgccacaaactccacctcggcaccgctgtccgactgggacccggccgcgaccccgccggcgcactgcgcgttcacgggcgtgacctgcgacgccgccacgtcgcgcgtcgtcgcgatcaacctcacggccgtgccgctccacgggggcgcgctcccgcccgaggtcgcgctgctggacgcgctcgccagcctcaccgtcgccaactgctatctccgcggccgcctcccgcccgcgctcgcgtccatgcccgcgctccgccacctcaacctctccaacaacaacctcagcgggcccttcccgccgccgccccccgccgcctacttcccggcgctcgagatcgtcgacgtctacaacaacaacctgtccggcccgctcccgccgctgggcgcgccgcacgcgcgctccctccgctacctccacctcggcgggaactacttcaacggctccatcccggacaccttcggcgacctcgccgcgctcgagtacctgggcctcaacggcaacgcgctgtcgggccgggtcccgccctcgctctcccgcctctcccgcctccgggagatgtacgtcggatactacaaccagtacagcggcggggtcccgcgcgagttcggcgcgctccagtcgctcgtccgcctcgacatgagcagctgcacgctcacggggcccatcccgccggagctcgcgcggctgtcccgcctcgacacgctcttcctcgccttgaaccagctcacgggggagataccgccggagctcggcgctctcaccagccttcggtcgctcgacctctccatcaatgacctcgccggcgagatacccgccagcttcgccgctctcaccaacctcaagctgctcaacctcttccggaaccacctccgcggcgagataccggccttcctcggcgacttccctttcctcgaggtgctgcaggtgtgggacaacaacctcacaggccccctcccgcccgcgctcggcaggaacggccgcctcaagacgctggacgtcaccagtaaccacctcaccggcaccataccgccggacctctgcgccggacggaacctgcagctgctcgtgctcatggacaacggcttcttcggcagcatccccgagtcgctcggcgactgcaagacgctcacgcgcgtccgcctcggcaagaacttcctgaccggccccgtcccggccgggctcttcgaccttccccaggcgaacatgctcgagctcaccgacaacatgctcaccggcgagctcccggacgtgatcgctggagacaagatcggcatgctcatgctggggaacaatcgcatcggagggcgcatccccgccgctatcggcaacctccccgcgctgcagacgctgtccctggagtcgaacaacttctctggcccgctgcctccggagatcggcaggctcaggaacctcaccaggctcaacgccagcggcaacgcgctcacgggaggcatcccgagggagctcatgggctgcgcctccctgggcgccgtcgacctcagccggaacggcctcaccggcgagataccggacaccgtgacgtcgctcaagatcctgtgcacgctcaacgtgtcgaggaacaggctgtcgggcgagctgccggcggcgatggccaacatgacgagcctgacgacgctggacgtgtcctacaaccagctgtcgggccccgtgccgatgcagggccagttcctggtgttcaacgagagctcgttcgtgggcaacccggggctgtgcagcgcgtgccccccatcgtccggcggcgcgcggtcgcccttctcgctgcgccggtgggactcgaagaagctgctggtgtggctggtcgttctcctcaccctgctggtcctggcggtcctgggcgcgcggaaggcgcacgaggcgtggcgcgaggcggcgcggcggcggtcgggggcctggaagatgacggcgttccagaagctggacttctcggcggacgacgtggtggagtgtctcaaggaggacaacatcatcggcaagggcggcgccgggatcgtgtaccacggcgtgacccgcggcggcgcggagctggcgatcaagcggctggtggggagagggtgcggcgaccacgaccgcgggttcaccgcagaggtcaccacgctgggccgcatccggcaccgcaacatcgtgcgcctgctcggcttcgtctccaaccgggaggccaacctgctgctgtacgagtacatgcccaacgggtcgctaggcgagatgctgcacggcggcaaggggggccacctcgggtgggaggcccgggcgcgcgttgcggcggaggcggcgcgcgggctctgctacctgcaccacgactgcgcgccccggatcatccaccgcgacgtcaagtccaacaacatcctcctcgactccgccttcgaggcgcacgtcgcggactttggcctcgccaagttcctcggcggcggcggcgccacgtccgagtgcatgtctgccatcgccggctcctacggctacatcgccccaggtaacaaaactctcgccgcatagcagcataaccacgtgtttgtactccttttaataatatttttttcactggctcgcatgcagagtacgcgtacacccttcgcgtggacgagaagagtgacgtgtacagcttcggcgtggtgctgctggagctcatcacggggcggcgccccgtgggcagcttcggcgacggcgtggacatcgtgcactgggtgcgcaaggtgaccgcggacgccgccgccgcggaggagcccgtcctgctggtggcggaccgtcggctggcgccggagccggtgccgctgctggcggacctctacagggtggccatggcgtgcgtggaggaggccagcacggcccggcccaccatgcgcgaggtcgtgcacatgctctccacctccgccgcggcccagcccgacgtcccccacgccttgtgcaaggtcgtcgattaatttgccttatatatgacgattatgtatatgatccgggcagggttagcgcctgtgatctatttagcggctgcctttttggcgtcactcgtctcgtgtgtgatgatggctggatggatgtgtaaaacaaataaccagcaggtggctactcgtgaatgaaagttgccggttcttattctcatgcatatatattagcaacacacaaagtgagatggcatatattccctttccctggcgtttgttgctttgggttattcgtcttggcttctcgcggaaggtctttctgctgttcttgaacgacaggatagtatagaggcttctatgagaaagatgcttcatgctgcgaaagttgaaaatggcagatgcacattgcgtatccccacagggcaggacactttgcgcatggcctagtactaacacaatccatggagcaaggaacattactgcccttggcctccaagctgcttccttaatcatcaaggatgaattaggaaaaaaaaggataaacggaccgccatgaccagagccagtgagggagccacttcacctgccgactgcaatcgacggcccacccgtcagccagagagaaacagtccaccgcggttggattggacgacgagatctcaacgtggggcggtccgagccgggcgcacgcgcacacgcgcttctcaactcccaccaatattaccctccatatatcaccgacaggtgggacatcaaccaagccggtacccaacaacagcacagaaaaccccacaggtcatagacagcggagctccctccagtctccatccaataacacgagctaaccaccgcccaaccgaaaccgggccccaccggtctccccgtcgccacgtacgcggccggagcgccctatacaagcgccacgtcgatcgccgactcgccgtcgccgcgtcccccacggctcttccttcatcctccggcgagctataaatccctcccgccgacgccacccccatggcatcccgcggttccccttcctcctactcctccccgaggaccccgacgtcgtcgaaggctaacccttggcccgcgccctccgccccgccgctgtacccgacgctctccatggccgacctcgcgcccgtcgagatagggcccgcctcgtcgccgacggcctcggatgactacaacgcgcctccgccgtctgaggacgtcctcctccgggtccccggcgcgcggctccacctcgtcgacc

SEQ ID NO: 580 - protein, 996 aa, Zea mays
MPPPTFLLGLLLLLLLAAAAPAPASATPERDAYALSRLKASLVPSATNSTSAPLSDWDPAATPPAHCAFTGVTCDAATSRVVAINLTAVPLHGGALPPEVALLDALASLTVANCYLRGRLPPALASMPALRHLNLSNNNLSGPFPPPPPAAYFPALEIVDVYNNNLSGPLPPLGAPHARSLRYLHLGGNYFNGSIPDTFGDLAALEYLGLNGNALSGRVPPSLSRLSRLREMYVGYYNQYSGGVPREFGALQSLVRLDMSSCTLTGPIPPELARLSRLDTLFLALNQLTGEIPPELGALTSLRSLDLSINDLAGEIPASFAALTNLKLLNLFRNHLRGEIPAFLGDFPFLEVLQVWDNNLTGPLPPALGRNGRLKTLDVTSNHLTGTIPPDLCAGRNLQLLVLMDNGFFGSIPESLGDCKTLTRVRLGKNFLTGPVPAGLFDLPQANMLELTDNMLTGELPDVIAGDKIGMLMLGNNRIGGRIPAAIGNLPALQTLSLESNNFSGPLPPEIGRLRNLTRLNASGNALTGGIPRELMGCASLGAVDLSRNGLTGEIPDTVTSLKILCTLNVSRNRLSGELPAAMANMTSLTTLDVSYNQLSGPVPMQGQFLVFNESSFVGNPGLCSACPPSSGGARSPFSLRRWDSKKLLVWLVVLLTLLVLAVLGARKAHEAWREAARRRSGAWKMTAFQKLDFSADDVVECLKEDNIIGKGGAGIVYHGVTRGGAELAIKRLVGRGCGDHDRGFTAEVTTLGRIRHRNIVRLLGFVSNREANLLLYEYMPNGSLGEMLHGGKGGHLGWEARARVAAEAARGLCYLHHDCAPRIIHRDVKSNNILLDSAFEAHVADFGLAKFLGGGGATSECMSAIAGSYGYIAPEYAYTLRVDEKSDVYSFGVVLLELITGRRPVGSFGDGVDIVHWVRKVTADAAAAEEPVLLVADRRLAPEPVPLLADLYRVAMACVEEASTARPTMREVVHMLSTSAAAQPDVPHALCKVVD

SEQ ID NO: 581 - DNA, 4284 bp, Zea mays
cggaagacagactcgacctcggcttcggaggagcctccacatcgcccaacctagggcgcaggccagccacgtcaacaggaggcgccatcatcaccctaccccgagctgactcgggccgcagggaaccagaccggtgtcccatctggctagctccgccagataggcaatgaaggcgccccgcatgctctgtgacgacggcggctctcagcccccttacggaagcaagaggacgtcagcaaggacccaaccgctccgacagctgtccctccgccaggctccatcgctcctccgacggccacgacatcgcaccagctgggtgccaaaatctctccggctgccacgacggcatgtacttagggcgctagctctcccccgctagacacgtagcactctgctacaccccccattgtacacctggatcctctccttacacctataaaaggaaggaccagggccctctcagagaaggttggccgcgcggggacgaggacgagacaggcgctcgcttggggccgctcgctccctctcccacgtggacgcttgtaaccccctactgcaagcgcacccgacctgggcgcgggacgaacacgaaggccgcgggattcccacctctctcacgccggtctccggccgcctcgctctccccccttcgcgctcgccctcgcgctcgatccatctaggctggggcacgcggcgacactcactcgtcggcccaagagacccccggtctcgaaacgccgacaatatgatatatagaaactataatgatacacatgcaattaactagtgctgataatatatttacactgtagatttttccgataagtagaaaccaaatatttcaccgccacaaaaggcttcatcccatcagttacccatgtagcaaaaccaaaatacttgtgtgcgagaggccaagagcccaaaccaccgccaaggaaacccccagcccaccaggcgccttcctctataaataccctaactccggtggccgaagttcctcacccattcactcactcatctcaaggcctaggtagcaccgtagcagctactagaagcagctagccagaacaactcgtccatggcgatggcctccgcggcttgctcatgcacggacggcacgtggtgggtgtacgcgctcccggcgctgctcggctccgacaccctgtgcgcccacccggccctcctggctggcctgatctttctggccaccgtctcggtggctctgctggcgtgggccacgtcgccgggcggtccggcgtggacgaacggccgcggccgcctcggcgtcactcctatcgtgggaccccgtggtctgcccgtgttcggcagcatcttcgcgctgtcccgcgggctgccgcaccgcgccctcgccgagatggcccgcgccgcagggccccgggccaaggagctcatggcgttctccgtcggtgacacgcccgcggtcgtgtcgtcctgcccggccacggcacgtgaggtgctcgcgcacccgtcattcgccgaccgccctgtgaagcggtcggcccgggagctcatgttcgcgcgtgccatcgggttcgcgcccaacggcgagtactggcgccgcctccgccgcgtcgcgtccacgcacctattctccccgcgccgggtcgcctcgcacgagccgggacgccaaggtgacgcggaggccatgctccgctccatcgccgccgaacagtcggcctctggcgccgtcgccctccgcccgcacctccaggccgccgctctcaacaacatcatgggcagcgtcttcggcacgcggtacgacgtcacatcaggcgccggcgccgcggaggccgagcatctcaagagcatggtgcgcgaggggttcgagctcctcggcgccttcaactggtccgaccacctcccctggctcgcccacctgtacgacccaagcaacgtcacccgccggtgcgccgcgctcgtgccgcgcgtccagaccttcgtccgtggcgtcatcgacgagcaccggcgccgccgccaaaactccgccgccctcaacgacaatgctgacttcgtcgacgtgctcctctccctcgagggtgacgagaagctcggcgacgacgacatggtcgccatcctctgggtaaagttcaaatcgatcgctttcctagcttgtttaactgcgcatacttctcagttctcaactgcgcatacctgtcggttctacagttttgtgtcgggctgtcggttgttcccggaagggaaaaaaaagaacaaagctctgtcgctgaaaaaaacatactgtacatgcatataatttgtttttgcaggagatggtcttccgcggtacggacacgacggcgcttctgaccgagtggtgcatggcggagctggtgcgccacccggcggtgcaggcgagggtgcgcgccgaggtcgacgcggctgtcggtgccggaggttgccccaccgacgccgacgtggcgcgcatgccgtacctgcaggcggttgtgaaggagacgctgcgcgcccacccgcctggcccgctgctgagctgggctcgcctcgccaccgccgacgtgccactctgcaacggcatggtggtcccggctggcaccacggcgatggtgaatatgtgggccataacccacgatgccgccgtgtgggccgacccggacgcgttcgcgccggagcggttcctgccctccgagggcggcgccgacgtggacgtccgcggcgtcgacctccgcctggccccgttcggcgccgggcgtcgcgtctgccccggcaagaacctgggcctcaccaccgtgggcctctgggttgcccgcctcgtgcacgccttccagtgggccctgcctgacggcgcggcggccgtttgcctcgacgaggtcctcaagctctccctggagatgaagacgccgctcgtcgccgcagccatcccccgcaccgcctgatccgtcctgccgccgacgcgtcacgtcacgcgttgtttgcatggatgatggtatctttgtctgtctgtgtggtcttcgctaaagtttgcttcttctcgatcgtcggttcgttcgtgcctccaccttagcctagggtttggtttcttgcaaggtagtgagtgtgtcttagtctcaccatcaccggggctccaattttggaaagctgcgtgttaggagttaacccctagacatgtttgcgtcttgatcgccaccacccatcagtatcagcgcagaaactacatatagatcagtgtttgtcgaccagtcatggaagtcgtgtgctctcaagtctgatgtattatatacatatatatgtattgtaatgtgattatcaagaaccgtgctatttacatattgctgtttaattgaactaattaactaaatgtcccttatatatatgtccagatcggccactaattaactagttattttacaaatatttacaagtcggtcgtcttaagaaatcaacgcacttcaacagtattgagccgtctggtgtcaaatgagacttgcgttcactaaagaacttaatcaggttctttttgaagcacgtatttcgattgcctgctgctggctgtaatatatcaattcaagcacttaaacaggttctttttcagtgcaacaagggatgtagaggtgccatggtttgggtaagcactcatttctgtggtttatagttcgtgagtagttccttatgtgtttgcctgcccctggttgtaatatatgataatgcagaacaatctcttgcaatactatagggccctccattctaatttatagattgttttggcctagtcgattaactgttcatgaacatctttattggatggactaaccaacgtcggcctaagtctaggggaaaaggcccaaccagcgccatgagtagatcagcctgcaccagcgtgaacagtgaaggcaggcccaaccagcgccagcatcagatcagcccgcaccagcgcgaacagtagacgagtgaatagtaaccgagtgaacgaaggcaagagctaaataaatatgacagtttctatatttgtatatttatcttaggagtcaagttgattagtttctatatccattggattagagtttaggtaagttaaatatgtaacttgaggaccaaattgatgcctgccaaggctatataaggacctagattatactctcttaaattgagtttcaatccaatctgatgacaaaatcacggcacagaccaccgaggtgtcctccctgaaagtcgaccaggttgtttgtattcacatcgccgtcaacaatatgcagtcccaaacaagtggatggtaagcacaggctcactacggaccacatcgcctctgcc

SEQ ID NO: 582 - protein, 548 aa, Zea mays
MAMASAACSCTDGTWWVYALPALLGSDTLCAHPALLAGLIFLATVSVALLAWATSPGGPAWTNGRGRLGVTPIVGPRGLPVFGSIFALSRGLPHRALAEMARAAGPRAKELMAFSVGDTPAVVSSCPATAREVLAHPSFADRPVKRSARELMFARAIGFAPNGEYWRRLRRVASTHLFSPRRVASHEPGRQGDAEAMLRSIAAEQSASGAVALRPHLQAAALNNIMGSVFGTRYDVTSGAGAAEAEHLKSMVREGFELLGAFNWSDHLPWLAHLYDPSNVTRRCAALVPRVQTFVRGVIDEHRRRRQNSAALNDNADFVDVLLSLEGDEKLGDDDMVAILWEMVFRGTDTTALLTEWCMAELVRHPAVQARVRAEVDAAVGAGGCPTDADVARMPYLQAVVKETLRAHPPGPLLSWARLATADVPLCNGMVVPAGTTAMVNMWAITHDAAVWADPDAFAPERFLPSEGGADVDVRGVDLRLAPFGAGRRVCPGKNLGLTTVGLWVARLVHAFQWALPDGAAAVCLDEVLKLSLEMKTPLVAAAIPRTA

SEQ ID NO: 583 - DNA, 3001 bp, Zea mays
gggtttttcccattcaactgtacattccaagttgcccttgttctttgatggtcgctttggtgcgtttagttgtctacatatagcctggccaggaccctttgtttggttgctcttgaccacagcctctatagcctgctattgtagacgcaaagatttcttctagctaggcccgcctctcgagatacacgcatggaatgagctttttttccagagccaatctctactggtgcaaaccatgagccaatctctactgattgtacatgccctaaaaatggattagcatgtaattattgcctgttaaatgattctaattcattcgaaagtgattaagactcaaggcttagtctaaattctatactcttgacaatgccatctcttgaaaacataataaactttaataccatttaagctcatataagcaatcaaacaacatctctaaataaaaaaataggctcgaccatgttcagacttggagccggattcagtagtttaaaaaccaccgagtagttctccttgtgctttcgggatgttcaaagactgccacctcactcatggagatgtctgctgcacgaacttgctgaggtacaaaggctctatgttgcacttccactttggttttgagggtaataaaaggctgaagacattttgaagttcaaatcttcgagtttctctaccgtttccaagcggaaaagcgaaaaggaatccatgctgtggcaaagctgtaaaatcgtccaacggctcggactaccagctgtctgtgacgtcagcgagaggcgagaggacggccgctctcggcgctcgctcgcgccagggtgacccccgggcggccgggccgctccacctccgtctctggatcgcgggtcccacgcatacggcgctggcctcgacggcgcggcaggactgctctccggcctccgggcgtgatcagcgcacccgatgctcgccacgtgtacccgcggcacgtgaccgtaccacggataggggagcaaaccagcaaagcacctgccacctcgacgcgacgcgatttcgtttgagtccccaccagacgggcgaaaccaactctctgcggcagagggcggacggcagagggttttggagcaggcaagcctggctcttcttgttcctccatctcttccgtcgccttgcgcgtgttggcggctgcgtacgcgaggccgccgcgtctggccggatggctcacgcggccgtcgtcgccttgctcgccgtcgctgtgatcttggcctgcttgccgccgcccgccgcctcgtcctaccggggaggtacgtaaaacgcgcgcccgcgcgcatcgcaaaccaaaccgtgttttcttggttcttccgggcgcacccaaaacctgacgttttcgcccgcggcacagcggctgcattgcgacggctcgagacagcggagcccatggacaccgcgcagggcttgcgggagaaggcggacgtgaacaaggtaaaaatacaaagacgcccgccgccgtgctgcgggctagggtcaaggaaaggcggctcttttttctgatggtctttttcgattctccggctcgatcttccggcgtgcagggcgcggaggaggacctgagcacgacagggttcggcgccgagtcggagagggaggtgccgacgggaccggaccccatccaccaccacgcccgggggccaaggcggcagtcgccttgatcgtcatgcgcgcgcgacacggcggcggtggatcctcgcttcctggaagtttgtggtcttgatcaggcgggcgtgaaccggattccacgatgatcctgctctttctttgttcttaaatgtatctgccatgcacctttggttctaattccattgttgtagtagggaagcagcatccacctatcaactatcatcaaaacccccctatgttttggcgtgccaattagagaaagggaattacagcgcgattcatataataagtgtgtacaatgaattccacgtatgagttgttctttccctcgtaattttgtcatcttgttttgttgctggttcattctttgattgatgttctgtctgtggttgctggctggtttggtttataaatgatcggcttgccattgaacgtctttgcattaatgcctgattgttcaagttcatattgtgggatgggaagcaagaacttccgtgttttttttttctgctaatcccggaagaaagcaactttgttcggttcgttgttttggcagagaaagaagtacgctgtagtgaggactaactactgtatggggcctgcgcgccgcttgtcttaaagctaaaaggggttatttttatataaaaattacgaacaggatcgagttcatgtctctttatctctggactgcttagcttgatttgcttttatttgcatcattatcagttcttcttgcccaagtaaggaatcaatatattatattacaatcacattcaacaaaacttttttctggatttcattgaaatgggcctcaagtactcaaagtaactgcattttacaacaactttgcacccaaccagtgaggtactagatagtgcttgatttatgtgatttctctcaaaacagatgtgtatgcaactatgcatgcatgcatgatgtttttaaagttgtcagattaacaacagcctgcatgtagtggctagttatgaattttggcttgtgttatcaagaaaatgaacttggtcacatgtttgtttcagattataatctagagacattatataatccaacgtaaataatctaacgggtaaacaaacacctagattgtaggtccagattatataatctaatacctatattatgatattcttataatctcgtaagagtagcttatttcagattatttttggcaaaagacctagtactcatagctatgtacatcaaaattacaaaatatatatcgttttcttttatccgatcagccaaatccctcccccgatggcgcttcctccaacctatagatggtcaaatgggccggcactaagcacggcacgacccgtaatgcttcagt

SEQ ID NO: 584 - protein, 94 aa, Zea mays
MAHAAVVALLAVAVILACLPPPAASSYRGAAALRRLETAEPMDTAQGLREKADVNKGAEEDLSTTGFGAESEREVPTGPDPIHHHARGPRRQSP

SEQ ID NO: 585 - DNA, 6911 bp, Zea mays
ttcaggaacaaaagctagcggggttgctactaattgctactgttgttgataaacacgtcctgatcagacgccacttgcttggatctgttttaataataataataataataataataataatattattattattattattattattatttcctttgctttctttttttgaactgattcttttgtatgttgcaataataatgttaaaagacaaaagtaacggcagggagttgcagatagacctaatatcaaaggctgtcagggcccttttggaacgcagggattttcacttcacaggtgcttttttttatgaaaatgaaccggttcttatgatttctttttttctatgtttcatcatacgagtggaactcgaacatccatcccaaatattagaagacaaaagtaacagtaggagagctgagaagcctgagatagacccaatatcaattaattaaagacttttatagcaaatccaaaaggatgcaaaaacacccccgtcaaaaaaataattattagggacaggttacatttttttggaggcaaatatggtgcatacttcaacagttttattcaaaacaaaggctaaaagaccgtaaaccgagcctatattttttttaaaaaaactagatccatctgccccattccgcaaacgattggggagacactacgtcgctcaaatatgtgggggtgggggggggggataggttgaaagcgggttaccgtatttttccaacaatgatggatccgtcgggctgatttggtgacaaggggatcccggaaggattgaagagaattgaggggaaaatgaactaatttccctctccattatctcgggatccagggtcaccaaatcaactctaaatctgtttttcgggttgttttaagtgcttttggagttactcttatacgaatttgagtcatttttttttaaaaaaaagataaatcaaaatatacattagtctgtacatagagtgactgctctgaaaaaaataaaaaaactgtagagacaccttagccccaataattgtagcacaggcaacaggtgcacagcacaacatagccccattgcatgcatggctgcagtgtgacacatggcggtggggccctgcccactgttcctccttcagggacggaaaggttggttgcggccccaccatggcgccaagtaatatcgccgctgctctctctctctcttttcatgcacacgctcctctctccctccctcccaccattgctacagtcgcagctgtctgtgtctgcaaagtactgactgctcccactccactccacccccagttccgggccactcgggcatcgtttctgttgctgcaaatctttgttggctgctgctgccttgctatctatctatacaccgcccgcaccttccattcctcctcctccgaagcagcaggcagcagctgcatcgcacctcacacctctcgtgtccatcgatccagccgccgccgcagctgcagctctcacttcactgttgctgtgccacctcctcgtcgcctgtagtgtctgtcgatagataaacgcccgcggaatgagagggaaggagcggaagctgcagcgggcgcgcgcgtgcaagggctaggactagcggttgcaacgtcggcgcgcgcggcgtacgtcgggcatggattgggatctcaacgcggcgggcgcgtgggacctcgcggagctggagcgggaccacgcggccgcggcgccgtcgtcggggggccacgccgccaatgctgccgcggcgggcacggggacggagagccgcccgccggcgcccggggcagcaggggcacccgccgagtgctccgtggacctgaagctgggcgggatgggcgagtgcgagcccggcgcggcccgcagggagagggaggccgcggcgggggcggcgaagcggccgcgccccgccgggcccggcgggcagcagcagcagcagcagtgcccgtcgtgcgcggtggacgggtgcagggcggacctgggcaagtgccgcgactaccaccggcggcacaaggtgtgcgaggcgcactccaagacccccgtcgtcgtcgtcgccggccgcgagatgcgcttctgccagcagtgcagcaggtagtatccccgccttcttttcccatggggggctggtgtagtgtagtgtagctcgtccctgtctcgtttcaaggatgcacaactttaccttttccggcttgcctttttttttttcgttatcttttttctctctctctttttcctgaaaaccaaagagatgaaaaaccttcatctcgttcgttcgtttcctcctgtagctacggtacctgaattattggcacgcctttttcctttctcccggcctcctcctgcgctcgctgctgctgctgcacactgctctcaggcaggcctagcgttcgtttccttcactttctctgacgccctgatgcgaattaacatctgctgctccccaatcgtctgctcaagattcagcccgctgccacggacacgtgagctcctgcgcttgcttttccgagcggtttcttgctttcacgccctttggcggcgacgggacgggatgccccccccccccccccccccggtactctgccattggctcctcctctagtcggcgctgcttgcttcccggcgacagttcgccaccgccgcagatgaagcgccgccacggtttggcgtgccgcgttgagcgagacaggggtgtactcccagctttggctaccatcaatcatttgatgtttaggtgccgcgttgtgagctgtactgctacagtatctctgcagaatgtattctgtagtagtatgaaaaggtaaaggcggcgtactgctatagtatctctgcagaatgttcggaggagtacaccaactgaaagaggtttaggaaaattgcatcgtggatctagaattctagatgcagtagtgtagcctacagtagccctgtacacacataaaggcatttttcttataaaattgtctcgcaaaatgggatttttttgtgctaattatagggtgctttagcgccacctgggccgtataggatgctttagcgcaacatttctgaacaaccctatgcagcttccatagaccaccacaggcattcccgcatgcagtttgctctaaatgcctccttttcatttttactatccctgaacgacgacccatctcagggaagtagccattaaatgctagcagtctttttttaaagtatcgcttggtttgagatgttattaggcccggtttggttggaaaaaccgctccattttaatctcctttagtttgtaaattacagtactaaactgttttagtctttagtatctcgaggagtgactaaaagagactaaaccatataaatttcaccttttatctcccatttatttcagttacactaatgacgggagaatgctaaagtgtattttagtcatcttataattgatttagtgtgttttaaatacttccttagtctataaaattaaacaggatataggctaaactttagttggactaaaccatataaatttcgtctggtgaagtttacggcagtacagcgctgtgttggcgcccagttttgtcttgctcatatggacagcagagacaggtcccgctctcctgtggtggacctaaacctaaacagcgtaggttcagatcgttcctggagcgatcgacgctgtggcaagcgatcctaatgcgatgctctggtgacatgtcctgtttctgtttacgccggaacatcttgctcggtggggacaattctcaatcattgatcactttgtcttctgctttaaattgcagactttgtaggttaatagtaagttgtcagccagtgagccaacagattctcagctttctgtttaccgtctgtgtggtccaggcttgacaggtcttatagtattttcctgtctctaataagcatggacaaggaacattggtccctggtgtgatgtgtattaactataacaagcatgtatgtgcgccacagtacattaactattctgacaataattacgttgctgtttcttcagtgaggaccatcttagcataccgttggatcatgtgcccaccctactacctaggaccatctattcttctaaaaaaaactgagtatcttatacttgtttagaattatcctaattcaaagaatcctgtggtcctaatcgattatgccatcattcattggtcagcatattacactgcaactttctcgtttgcccgtactcgaattcagttgtctgatcaagagttttttttttgttttttgtttatgtaggttccatctacttgcggagttcgacgccgacaagcgcagctgcagaaagcgtctggacgggcacaatcgccgccgcaggaagccacagccagacaccatggcttctgctagctttatcgcaagccagcaaggtcattttcgtactcaccaattttgctttggttttttttctccccaagtctgtacttggttcgaatacatctacattgtttccatcttgctggtgctggacaaagaaaaggtaaaacgtcagaacagatctgtgcacacataaaccatgagaagtaaaagactgctctgttaaacttgtagagcttgcgtagcatttcagcatgtttcagaactagaattcggttcataagataagatgctactctagcatccctgcatacattagttgcgacaagacgaagattacattgttgacgcatcaagttattatgaacctcttctgtttctgtcaattgtgtcctcatatttagtgcaaggtcttgctaatgcctttaagttaaaaaagattagtatactgtatgtttctttgcctttcagatgtgttctagtacaaactacttgtatgcttcaccacttgtagattggcatgtatatgagtctcaaacttccaacacaattgccagcagattggcatatagaactgcaataaaaattctgattcacattgtatgaaacggcgcacagaatcaatttatcagttatgtcacctgatcgacatttcttcccaattgatcaggcacgcgattctcaccatttgcgcatccaagactggaggcgagctggccgccgggggtgatgaaaaccgaggagagtccatatcacatcactcaccaaatccctctgggctccagcagcagcagcaggcagcagcatttcgtggctctgggagccgccacgcctgcctacgccaaggaaggccggcgcttccctttcctgcaggagggcgagataagcttcgccaccggcgtggtgctggagccgccggcggcggctccagcgtgccagccgctcctcaggacgggagcaccatccgagagcagcggcgccggcggcagtaagatgttctccgatcaggggctggctcgcgtgctcgactcggactgtgctctctctcttctgtcagcgccggccaactcctccggcatcgacgtcagcaggatggtccgcccgactgaacacgtccccatggcccagcagcccgtggtcccgggcctgcagttcggcagcgcgtcgtggttcccgcgcccccaggcttccacgggcggctccttcgtcccctcctgccccgccgcggtggagggcgagcagcagctgaacgccgtgctgggccccaacgacagcgaggtgagcatgaactacggcgggatgttccacgtcggcggcggcagcggcggcggcgagggctcctcggacggcggcacctcgtcgtcgatgcccttctcgtggcagtagtcgtcgtcacttgtcagcagccgctgcgttctctcatctttcgcgcttcagacgatctggtagggagatactggctttagtgatcactgatcagcattgatttctgttctttttcctgcattcgctttgttgaatcggctctgctcgccagcattcgtgtggacattttttgaacataattctgtgttcgtttccctcacattatctttgctacggtgacacctgccggctgctgaccgtagcatgttccttctcttgtgacttgttctcgagacgtccatttgatgcagggcgcatccagaatttttcagttgcagtgcagacgcaatccgatgcgtttgaagatgacgggcatgtttggttcacggctaactgtgtcatacttcgactaaagttagtcgtccaaattgaagaactaactcaggcagaaaagttagataaaatgtggtaagttaggtagtaaaccaaacagacccgacaactgaggacttgttcggtttgaaggggtttaaggggattagaggggattcaatccccttctatacaaatttatatagaaggggattgaatcccctccaatcccctcaatccatccctaaccgaacagggcctgaacgggctcgccacatgtaggcatgaagaatagcttgctaaatctgctaaaaaagtaattgattggtaattcgtcctcattaccctagtaaaaaaggggacaaaatacgtaggtgccgcggcatcaggattgctggaggtagcagagcacagaacgtgatgagttcctgcaaggagtcgtgaatagcccctatctcgatctccgattctccacggtaaattcctccattagataatatcgatgagaaagtttttctccccacccacgagaatgtaaataaagaaaaaaattctccaccgacaattaaatgaggacgagaataaggaagcatttctaaccctgtttcttgcggggacccgttaaacttacatataatgatgtttttatataatagttaataataaaaataaataattatcttgtcaagagatcattcattataaatgtgctcattttgatgtaaacataatgattatcttacatctgacaatatgaagtgacaatgctttgcatcaataacaaaaaagtatgtcctaattataatttaagcgggggcggaaaatagggatgaggaagaaatacccag

SEQ ID NO: 586 - protein, 432 aa, Zea mays
MDWDLNAAGAWDLAELERDHAAAAPSSGGHAANAAAAGTGTESRPPAPGAAGAPAECSVDLKLGGMGECEPGAARREREAAAGAAKRPRPAGPGGQQQQQQCPSCAVDGCRADLGKCRDYHRRHKVCEAHSKTPVVVVAGREMRFCQQCSRFHLLAEFDADKRSCRKRLDGHNRRRRKPQPDTMASASFIASQQGTRFSPFAHPRLEASWPPGVMKTEESPYHITHQIPLGSSSSSRQQHFVALGAATPAYAKEGRRFPFLQEGEISFATGVVLEPPAAAPACQPLLRTGAPSESSGAGGSKMFSDQGLARVLDSDCALSLLSAPANSSGIDVSRMVRPTEHVPMAQQPVVPGLQFGSASWFPRPQASTGGSFVPSCPAAVEGEQQLNAVLGPNDSEVSMNYGGMFHVGGGSGGGEGSSDGGTSSSMPFSWQ

SEQ ID NO: 587 - DNA, 6485 bp, Zea mays
aagtttagctcaaattaccatcattagctctcctgtttagattataaatggctaaaagtagctaaaaaaaagctgctaaagtttatctcgcgagattgaaacatggccttagtagatgtttgttgcaaaaaagtgaagatgatagataaggtaaaaacatattttagtctcttttaggccccgtttcaatctgacgggataaactttagcttcctgctaaactttagctatatgagttgaagtgctaaagtttagtttcaattactaccattagctctcctgtttcgactacaaatggctaaaagtagctaaaaaaagctgctaaagtttatcttacgagattggaacatggcctaaagaactaaagtttagtcactctactttagggggtgtttggttagagggactaaagattagtctctagtttttagtcccttttagtcccttttttgccaaacactaggactaaaatatggactaaaatgatttagtctttagtccttcacataggtgctaaaagagactaaaagctcataattatcatgttgcccttacctttttatagataactaatattatgagtatattctaagggtatttgagtctttggacaatgtatttaatgactttagaatctatttagtcctaaaaccaaacatatagggactaaagtttagtcctaggactaaagtttagtcctagaactaattgaaaccaaacatgcccttagtcagcatgtttccttatttaggaactaaaagtgactaaactttagtcacctcaaataaaataggtctaaatctggaattattttcgtgtattctcgagacagaacgatttgatatgtgggtcagtgggtacaggcggcctgccagccgggcttctgccactgtaccgcggcgcggtgcgccaaagatggcatgcggctgagcggcctccgcctcgctcggctcgccgccacaagcgcaagtacctggcgtctacaaaaagccctcggcaggacgccagttgttgggacgggggacggggctataccaaccagccaaaaccaagcagggaatcacaccattcaccaagcagcagatggaagcgaaaggtggcgccgcggcgtggctagctaggccggctcgtgcgcacgcggagacagacacgggactggttgcgtgaccgagctctggtctggtggctggtgctgagagagagggagacagacgacctgcagctcgcatcacagtcccacagtgcaggagggagtggaagagagtagagagagagtgggagcgagagcacagggaggggagttgttttgaaggcaacagcgagccctgctgtccctctgcttcgccacctcctccctccctctctttccttcctcttggaggagagagaagagggggagagccagtcagccagccagcccaagaacagcgtacgtacgttgtcaagtcccgtcgccgccgcagcagcttcgctcctcccgccccgcccaccgtcgcgcgcggcggcggggagcgagcaatggaggccggcggcgccagcggcggcgacgacggggacggccagctgcacggcctcaagttcggcaagaagatctacttcgaggacgccggcggctccagtagcagcggcggcagtggcagtgccagcgcgaccgcgcctccagcgacgcagcagccgtcgccgccggccgcttcgcctagggccgcgcccggtggcggcaggaggggcagggccgcggctggcggcgcgggcccctccttgccgcccgcgcccccgcgctgcctggtcgacggctgcaacgccgacctcaccgacgccaagacctactactgccgccacaaggtgtgcgaaatgcactccaaggagccccgcgtcgtcgtcaacggtctcgagctacgcttctgccagcagtgcagcaggtcgccaccccgcccccgccattgctttctcattcagttacttcctttttcagtttgacagctagttgcatccgctctgcttcctgtgttttatttccgcttcttgtctagggtttatggaaacttggctaaaattaaacagttttaggttcactattatcgatgtacatcacatctatgggctatggcgatgacaattgttttttttttcctgacaccttctctttctggagaatgaaggatttttttttaaaaaaaacaaagatgagaacttgctttggtatcactactatactttaatgcttggtttgaatggtgctcatgagaactttaaagttggtaggtttgatgggtgctcctaaatatgatagagtgatgtgactcagccttgcctgcctgtctgtcagtttgttctgcattagattccagtgttaacttgcctgtcagttaacaagccattactatatggaatttgccttgagcttgatcggattgtgggtggtctggtccccaaaggaacaccactgaggaatttcaaaggagcctttgccgatgtggttgagtattaatctagagttccaactttacaagttgataatagtgctcattgcttagtctgcctcaaaaatagcactagacattatttgtcccctgtacttaaccaaactacatttggggtccttcacgaaaaaaaaaccctgcatttggcatgatcagttggccctcagtggtccccaaggaagaacaggcttgtctttgccactgtattattcttggtgttacaactttacaggttgtatgatactattcatattcaatgtttagtgcctaaaaaaacatgctcctctattttggctactaatacttaacaaactaaattaaattcattcggttctagatctggagaaaaaagtctagtcctttcaggtggtacaccgaacttaggttgtttctggaatagcttgtttcagtaggatacacttagcatattcattcagaaatttgctactgatgcctaatgatagcaagtgtatggaaagatcgagctgtctggtgcctaatgatagtaagcgtatgggaagatcgatctgtattgtgtcttagtaccagaacaatgcagcagagggaaaggaaagaaaaaagtagaatgtagttacgatcctacagacagctggttgtttcggtaatttggttctctgtaatttgacaatggtagcccgtaggattaaggcagtgtttagttaacttcaccgtatcatattctgtaatatatagtttcaatttttgttaggttcgatccaagcttttggttttctttgtcgataaattagttacaacagaaaaacaaaacaaaacaaaacatgatatataatggaagtgtggaactacatgtcttaaacatcgatatgcgtaggggtaggacctgggcacaccaccctatcgaccacaccttttgtgctttgggactaggctaaaggggtgtcctaacgtccccagcaaagaaaaggtgccacacttctggatttgggctgtactaaaccacagcaccacatagccacaagccacttatagcaacaacacatcattagagaagctaagttggaccatccacctgctttgctgttaaggacacctggcttgacattgcatggaaatctcattggtggatgtgcattgttgtgttaggcccggcatctcacatctctgtgaatgattacatgcactctctttgctttcttttagtatggatgtgcaggtgtaattatgagtggcataagacagaggttaatcttttaatggatgttcagtactggcctagcctagtaggaagagaaatgttactcttgagggcttgttcgttttgctctcaatccatgtggattgggtgagattgagtggatttaaatcctaaacaagtgaaaatctttcataatttttttcaatcccattcaatccacatgggataggaataaccgaacaagcccgaatgtatagcattcccactggctttgacctaaagtatggttttttatatctatgtcgcactatgcatgttgctactaagataagttgcgctattaaggtaaactagcactttgaacttactattatcccatcattcaacttgcatttcattctattgtaagtgttattatggttgatgcttgatccatgaatttaatacttcctgcttcgtttgcattatacacaaaagttatcaatctacatcaataatatatgtggatttggagaatgcaactagcttgtattcctcataaaaccctgttactgtgcctcctcgcctgtaagttgaatcaaggacgcttgagtgaccacatctctctgtccacactgatcacaggttccacaacctggccgaatttgaccagcaaaagaaaagctgtcgcaagcgtctagcaggccacaacgaacgccggagacggccacctcctggaccccttgcgtcacgatatggccgtctcgctgcaccgctcggtggtacaaaaaagctgcttcatttctttctacttggtgacttgggtgaccaaagtttcagttttttcgtatctgttgctaatgttcctacacttgatccagaagagcccggcggcaggttcagaagcttcatgctggatttctcatacccaagggttccaagcgccatgagggatgggtttccagcggttcgacctggtggtgaaagggtgcctggcagcaatatccagtggcaagcagcgagcctagatcctcctccccctcaccatcagagcgcggcagcaggatacggtgcccactcgtacgggagcccgggtagctcgtcgtcgtcgaggccaccggtgttccctgctggcccggagctccccccaggcggtggatgtctcgcaggagtccccacggactctagctgtgctctctctcttctgtcaactcagccatgggacgctgctggccacagcgccggccacggccacggccacgccgcgtcactgcccgcaacagcaggcttcgacggcaaccccgtggccatggcgagtagctacatcgcgccgccaagcccctggaccgactcccgggcccacgaaggcgggcggcggaacgtgcctcaactgccacccgacgtccccctcggcgacgtgcactctggcccaggcacccatcacggccagttctcaggtgagctcgagcttgccctgcagggaaacaggccagccccggcgccgcgcaatggccagggctccgcgggcgcgttcgaccaggccggcagcacgacggagtggtcgctctaggaggccaaataaaagcgcggcacatcgtcgtagccgcacagcgagatggagcttgaagcctggctccgctagctacctgcatgcgctgtttgcttgcctagaggctagagcatccagtatgataataagcgaggaactagtgcagtgccggccaggagactgatttcttttgcgcttgtccatgaactcgtctgttgcgtctatgtacacctccatggtttgaactcgtcggggacttcgctcgatgtgttattaatctcatgctcatccttccgctaatgttgcctggcggcatcgccaggaatcggttccaaggcagcgttgttcatgtaaagcgagaccgcaggctttgcagcgtgctctcagcaccagtggtgtgggtgccgatagacaggctgactgacggagggcagaatgagatccatcgtccatgcagcagagcagcttcctccaaatctacagaaattttctcagtggatgagaacaaacagcggcacctttcctgtgaaaaaagagattttattgtttccttcctcctgtctcgaatcacagcttgtcgtgcagctagctgttccgatctctctcgctcgttttcgtccagtccctccctgttcgctgatcgagcaggcgtttgcggttttctccccagtgagtagagacagcgagtgttctggatctgtcgtacaggtcggggactgtagctgccggtgcacagcgtgcgtgattcagggccccgcccaaacagactgaggaacccacacactagaacaccaatgaaagctgcatcagtctcagatgcggcagcctgtagactacgtagatccttggacgatgaacagcgaccgcgatgcacggtacagagatcctatcaccgcactgtagatgctcgaggaagtagctagctagggctggggcgttcacgagtgccagctgatacagacccgaggacgaggagtgtaagatgtttccgttggagaatccactcactcagttttttttcttagtagcatgtaaatgcaacagctgaagttgaagaaaagtacccgattttacagactgaaactttgagagtttgcacaccctctcgagcattacacacctccattggaaaatcccatcctgaagccaccgtcgtctcctctcggagagtggcggcgcttgttgctgggccgaaatgtatgttaaggccggcccatgtggtggtttatggggaggatccacttccgacggggggttcggccttgctggtcgcatcgggatgggttggtccagctacgag

SEQ ID NO: 588 - protein, 408 aa, Zea mays
MEAGGASGGDDGDGQLHGLKFGKKIYFEDAGGSSSSGGSGSASATAPPATQQPSPPAASPRAAPGGGRRGRAAAGGAGPSLPPAPPRCLVDGCNADLTDAKTYYCRHKVCEMHSKEPRVVVNGLELRFCQQCSRFHNLAEFDQQKKSCRKRLAGHNERRRRPPPGPLASRYGRLAAPLGEEPGGRFRSFMLDFSYPRVPSAMRDGFPAVRPGGERVPGSNIQWQAASLDPPPPHHQSAAAGYGAHSYGSPGSSSSSRPPVFPAGPELPPGGGCLAGVPTDSSCALSLLSTQPWDAAGHSAGHGHGHAASLPATAGFDGNPVAMASSYIAPPSPWTDSRAHEGGRRNVPQLPPDVPLGDVHSGPGTHHGQFSGELELALQGNRPAPAPRNGQGSAGAFDQAGSTTEWSL

SEQ ID NO: 589 - DNA, 4664 bp, Zea mays
aactaaaaatgtaatagtgcgtagttggtatcaagtatcatagctattgatattctattatatattttttgttaaatctaaattattttgttttttcaaaaaacgataaagtaatttattaggatagaaagaaaagtttctataaatttgatttagggggtgtttggttacattccgctaaaatttagcccctgtcccatcgaatgtttaaacctccgttccgggtattaaatgtagtcggattataaaactaatttgtcagccgaagattaaaagacaagacgaatctagtccagttggttgggtttatatttcatactcctaattaaaagtcaaacgcttgatgtgacccaggctaaactttagcaggagcaaccaaacatctcttagtagtttagaaaagcttgacttgattcaaatataaactataagtttataataaggaacgggagattctcgtgaccgtgtctcgactctctcacgtgtcaccctgctccgccttttgtctctgctcacgtaccagtatcccagtcaaagcgaggcggtacccccctaaaacgtagggtcggacaacaatatggctaccagccgaacactggcggtctggcgcacaccatcacatctaaccattacacagtacgcacgctcccaggctcccgccagtcacagaggcccactctccgggtcctcgagcgaagcatttgcattgccagccccgggactcggccggcgcacacgtaaccacgcgcgcgctgctctgtgctctctgttgctgccacccttcctctgcgttcctccgactgaatgatggactgaatgatggattggacgtgcgcgctgatggatgagcaggcctgacaccaaaattgacgcgccctgatcgtatctttccatcgatctcttcctcctcgctactctacgtactagtagactagaaggctgtgtagtagggctctgatcctattatcttcatcaaatttgcgcggcgtctgcgttccctgcttcccattcgaaaacaaaagcaaaaggtgcgcattcacggtgtcgccctcgtctctactcgtgtctcgtcttgggtagcgtacgcaccttagctcgcaaccatccatccatccacggggctcgggcgcagcagcctcccccgtcgtcgtcttcgtcgtcgccttgccgccgctctgatccgtgcccgatgcatcgtcagccatctcctcacgccttcaggtagtaaaagtatactaagccgcagggcaccacaacgcaacacgtggtgcctgcctgcctccttccttgttcgctttgcggcgcgagcgttttgtctgttgttgtctcccttgggaccggcgcgtccggctggctcactaccactaacgtgttgttgcctgccttgtgcggcgcccgtggttcgcattgcgtttgcagcagcagcggcagctgggcggagcagggcgcgggcgggtaccgccacggcagggacggcgccaccttcctcctccccgagctcctccagcgcagtaataacgccgccctgccccttgtttatccgcctgcctgcgtattttgtttcctttctttttcttcttgttggatttctcatggctgttggttgcacgcgcgcgcatcgcgggggctaatgtgaaggccccaaccccagctccaagtcctccagcgccgccaccttcgtgccgccgctcgccgccgcggtgagttcactgactgagaatgagatacggttcgttctccgccgcggcttcttcactttgagcgtgaatgacatggaggctctctctggcgtctttttgtctgcagcatggaggaggagtagcggccccgtttggcatggcgccgctgggagtggcggcggcggacgaagcccggttctgcatgacgccgtggtcagcggcggcgcacttcgagaactggggcgactccggcatcgtcgtcaccagcccgctcgccgagacggcctccaccgacgtcgacatggtctgctcctcaatactcagcttccatccatcttcatccgcatgcacagtatatatgcctgccatgaactccgcctggagtatatgtatatgccgtgacgtgtgactccaccgccgtcgtcgtagggtggaggtggagccatggcgcagagcgtcgacggacatgacaactcattgccggcgtgcaaggtggagcccagggatcacaaggtgcgctatgccatgtcacgtgaacacgtcgtcgtggtcccaaaaaggaactagaagagcagcagatgtgattgtggtttttgtgctgtgtcatggcaggcgcagaggaggcttgcgcaaaaccgcgaggcggcccggaaaagccggatgaggaagaaggtgatcccccttcccctcacgggaagcttctgtacattatgctatgcttgcaagttgcattccatcctgtcttcttcttgctcagtacccccctgtttatttaccctgacgggaggcttactgagttttgtctacagttttactgtaccatgctgtcactgtttccacttgcaagatcgctgaagcactgtgcaaattcgctctgtaggcgtacattgtggagctggaaaacagccggtccaagctgtcccatcttgagcaggagcttcaaagggcaaggcagcaggtgaactcctgatctgttttcctctgaagaacgaaacgatccatactacttcgacgctgattgtctatgggctgtaaatacaggggatgttcattgcaagtggacgctccggagatcatggatgctccactggaggcagatgatctttttttcttctcttttacattgctcagctcttgttctctgaattctgatcctgtgcaatgtaaagcctaacctgtgtccttgcaggtgcgttggcgttcgacctggagtacgcgcggtggctggacgagcaccagcaccacatgaacgacctccgggtggccctgagcgcgcagatcggcgacgacgacctgggcgtgctggtggacggcgcgatgctgcactacgaccagatgttccggctcaagggcgtggccacgaggacggacgtgttccacgtgctgtcgggcatgtggatgagccccgcggagcggttcttcatgtggctgggcgggttccggtcgtcggagctgctcaaggtgctggcgcggcacgtggagccgctgacggagcagcagctggtgggcatctgcggcctgcagcagtcgctgcagcaggccgaggacgcgctgtcgcaggggatggaggccctgcagcaggccctcggggacacgctcgccgccgccgccacgccgtgcgccgccgacagcgtcaccaactacatgggccagatggccgtcgccatgagcaagctcgccaccgtggagaacttcctccgccaggcggacctgctgcggcagcagacgctgaagcaggtgcgccggatcctgaccacgcgccaagccgcgcgcgcgctgctcgtcatcagtgactacttctcgcggctccgtgcgctcagctccctgtggctgacgcggccgacggattgattcggcgtaggcacacggacgggagctgtcgttggttggttgcgctgagactgtaatctgtatccgttgtgagatggggtgaccatgcggattcatcaggcagaaacggcgaatgtgtctagctttagttttggctaccattcagcttcatcagtgaggctagagtagagcgatttcggtgcgcatgtccaggcttttgctccgcgttcattgtctcggctgcaattgcctgcggtctgcagattccctcgtcatgggctcatgcccagctgcgcgccggccgcgtgccgtggaatgacggaatgaggaagctgggtccgcggcaatcatgcgccttgcccgcctagcgtgtcgactgcatgcagtcctgcggggacctgatcgcgtggctaccgatcactactgcactgacactggataccgtgggtgcatagatgtgcaaaaggactcggtactggctaacaagggggtgtttggttacccctgctaaagtttagctcgggtcacattaagtgtttgacttttaaataagagtataaaatatagacccaactaactgaactaaatttgtctcgtcttttaatcttcggctgacaaattagttttataatccgactacatttaatacccgaatcggaggttcaaacattcgatgagacaggggctaaattttagcggtttgtaaccaaacaccccctaaggctgtgtccaacaactaacgctataacgaactatacgttaaatatagcgttgttgtgtccaacgagtaacgctataacgtcatatagcgttctccgctcgctcgcccacacgcgtccagcaatgtgaatcaatacgacataaagtagattaaacacagaagacatatttagcatgaaaaacccctccaaagcgaaggagaaaaaaccacggacaccgacctacaacaatatcactatttttcgggttgttacagatcacaagagatttacaatgaggtgacgatctcttgcggattataagtgtatttatagagacgaaaccctaaggtgagtagagaacactccggcccaagcctcccgacgacgggcctccgcttcgctcgccaacttggccgcattcttcagaattttgatcacaaactcaacaaacgat

SEQ ID NO: 590 - protein, 432 aa, Zea mays
MHRQPSPHAFSSSGSWAEQGAGGYRHGRDGATFLLPELLQRSPNPSSKSSSAATFVPPLAAAHGGGVAAPFGMAPLGVAAADEARFCMTPWSAAAHFENWGDSGIVVTSPLAETASTDVDMGGGGAMAQSVDGHDNSLPACKVEPRDHKAQRRLAQNREAARKSRMRKKAYIVELENSRSKLSHLEQELQRARQQGMFIASGRSGDHGCSTGGALAFDLEYARWLDEHQHHMNDLRVALSAQIGDDDLGVLVDGAMLHYDQMFRLKGVATRTDVFHVLSGMWMSPAERFFMWLGGFRSSELLKVLARHVEPLTEQQLVGICGLQQSLQQAEDALSQGMEALQQALGDTLAAAATPCAADSVTNYMGQMAVAMSKLATVENFLRQADLLRQQTLKQVRRILTTRQAARALLVISDYFSRLRALSSLWLTRPTD

SEQ ID NO: 591 - DNA, 3338 bp, Zea mays
aaataatgtcgtactgtatacactcgagatttccatcgcacaagacacgaaaaaatcccgatcaatttaacgaacattgttttgcattatagattatattgtttacagaatgaagttaactaaaaccttaaccttttgcagataaatctctaaatagtgccgtactgtatacactcgagatttccaccgcacaagacatgagaaaattccggtcgatttgacaaagactgggtgttattaattagaggaagcagatccagccacatgttgtctcacatctgatcccccacgtatagtcgtatacgtttggcccaaacctagctcgatccatgtatgaaacacgtctcgtctcgccttctacctcctttttctatcacaggagattaaagtgagagagagagggcgctcaatgaactgcggcattgaacaatggagctgcaagagcaatgatgcactagctagtgtaatgcagtgcatgcatggtagattggtagcttgcctttgcagtttgcaccaggcaccagcagcagctagaagacgacagacgacaggggtttggctgctaggttgcggaagggcagttaccagttgccacaaggggagcctggccctctgcatcctcctcatgatagctctgtctctctctctcacagacacacacacagagactcttccaaattccgaagcggccaatgcaatgcaagagccagcccccggccgtgtgtcaacttcacttgtctctctccaaaagatatcgtatcacccatggccatgacccccctcccccagccccaacctatatcacctagcgcagctacgctctcttctcccgctctcgctctctgcatgctagctaccttctagctatctagcctctaggtccaatgcactccctccttataaacaaggaaccctccttcgcctctcttgccatagaccggacaccggagaggtcactgcacaggagcgctcaggaaggccgctgcgctgagatagaggcatggcggccaatgcgggcggcggtggagcgggaggaggcagcggcagcggcagcgtggctgcgccggcggtgtgccgccccagcggctcgcggtggacgccgacgccggagcagatcaggatgctgaaggagctctactacggctgcggcatccggtcgcccagctcggagcagatccagcgcatcaccgccatgctgcggcagcacggcaagatcgagggcaagaacgtcttctactggttccagaaccacaaggcccgcgagcgccagaagcgccgcctcaccagcctcgacgtcaacgtgcccgccgccggcgcggccgacgccaccaccagccaactcggcgtcctctcgctgtcgtcgccgccttcaggtatgtgcgtcagtgcgtgtggtgtgggtagtatatatatatatatatatatatatatatatatatatatatatatatatatatatatggcctctctttgcattggcacgccaatcggccatcgagatccaatcatatatatcatccaaacgtatagtattagtacatctgtacatgtgactgcaaactgacgtgcacgcgtgtgcaccgtcgtcatcactgatcaggcgcggcgcctccctcgcccaccctcggcttctacgccgccggcaatggcggcggatcggctgggctgctggacacgagttccgactggggcagcagcggcgctgccatggccaccgagacatgcttcctgcaggtgctgtagtacgttcttttcttggggattgcgcgcagtttcacgtacgtacgtacgttcgagtcgatcgccgcgtcgttccatccaccggccggtatatataactgttgggtacggcggtgcgcgcccgcaggactacatgggcgtgacggacacgggcagctcgtcgcagtggccatgcttctcgtcgtcggacacgataatggcggcggcggcggccgcggcgcgggtggcgacgacgcgggcgcccgagacactccctctcttcccgacctgcggcgacgacgacgacgacgacagccagcccccgccgcggccgcggcacgcagtcccagtcccggcaggcgagaccatccgcggcggcggcggcagcagcagcagctacttgccgttctggggtgccggtgccgcgtccacaactgccggcgccacttcttccgttgcgatccagcagcaacaccagctgcaggagcagtacagcttttacagcaacagcacccagctggccggcaccggcagccaagacgtatcggcttcagcggccgccctggagctgagcctcagctcatggtgctccccttaccctgctgcagggagcatgtgagagcaacgcgagctaccactgggacgtgcgttgctgtcattgtcctaggttagtagctagtgccagttactagtaagcatcaggcataggagtatgtagtagaagcatgtctggagaaaggcaatagctagcgtttgggagatctctggcggtactattattagatagcgaatttgcatactatgcagcatgcatgttgccggccgggcgggctttagactccagctactgcatgcgtgcatgcggtggtcctcatgtatgtcggcatgtgtgcgtgtgtgtgtggcagcagcagcagcagtgaattctagtgcagtggtggtggttgtaacgtgtagtttgggggcaggggcacagttgtgtcgaacttgtgcggttgtcccttccttttgtgacttccagaaaagggaatgaggcctgcctgcgtgtctgcttttccatgctcacctcgcctgttgtctgttgagacttcactcagccctgttggtgccttgtagttccagttccagagcatatgcaggtgcaggaatggcatctctaccactgctttcgacttgttggcttgttttcttctatgatactagtgtacttggattgaatgatcacattttttgctggcctcgtatctttgaaatgatcatgttaatttggttacacataagacgataagggtaggtagttcaatgctattagaaaactaggtatttttagttatattttaatccaggaaaaaatatataaaaactaatcgtgatatatagaaatacgcatatgcaaacttagtataataattatgaatacaatagatagtaacctgattgtatatacttttaagggaaaatagatatggcaatgggcctcgatcttcgattctctgcggagaattcttccattaaaggatagggatgaggaaacttcgtccccccacggagatgtaaacgagaaaattttctaccccgatgggtaaaaccagagatggggtgaggaaacatttcccata

SEQ ID NO: 592 - protein, 325 aa, Zea mays
MAANAGGGGAGGGSGSGSVAAPAVCRPSGSRWTPTPEQIRMLKELYYGCGIRSPSSEQIQRITAMLRQHGKIEGKNVFYWFQNHKARERQKRRLTSLDVNVPAAGAADATTSQLGVLSLSSPPSGAAPPSPTLGFYAAGNGGGSAGLLDTSSDWGSSGAAMATETCFLQDYMGVTDTGSSSQWPCFSSSDTIMAAAAAAARVATTRAPETLPLFPTCGDDDDDDSQPPPRPRHAVPVPAGETIRGGGGSSSSYLPFWGAGAASTTAGATSSVAIQQQHQLQEQYSFYSNSTQLAGTGSQDVSASAAALELSLSSWCSPYPAAGSM

SEQ ID NO: 593 - DNA, 6593 bp, Zea mays
ctgctgctgctgatgcttcttcttcttccaccgattgattgagatccaaggaaatgctgggcgcgtttttaaactggctgatcggcttcgtcccatgatctgagatttccttttcagactgttgtatatgtagcggcgacatggataggatatgtatggaccgttttaattaatactaaatatcaatggtttaactcttcactattactcctagctagatgtgaaagctcgccctggaatgcacatgaacaactacaccgagttgggcagtttggcaatgcatgcagttcaagagccacgccggttaacccttcactttgtagttattgcctgcattttgtaaatttggtgtgaacttaattctaatctgtaattctgtatagagaatggtgcatgtactgaactcctgactgatcaaaacgtggggtccactttcctcgccgaaaaagaaaagagaaaaaaaggtttattgtccactttattaaaaactggacttatatatatgcttggaacaaatacttagggggtgtttggttttaggaatctctcaatctaaaataaggtggtgtatcataggtttattactcaaatttggtgggatgatctcattgctcatattagtactaactaactaactatgaggaatgagatggtgatggatcaacccattacattctacaaaccaaacaaaaaagtgaggagtgagaagatggtgaactagctcatttctcaaaccaaacactctattaataaaccaatcgcgtagctaataaatatatgtaacctcgacattctagctacagcttgtggttggtagaaaagcaaatcatgctcaaaataatgtgctccgaaacttcattacatttttcttcacttgagtgtacatacattttttttcccttggccctcttatccttaactaagaagcataaaacgggatttctcagccagttcttagcttctcttataaatacagaccttgtacaacactttcacctcctctcaggtggccaggatattttttctggccccttcctgccctcttcacactgacccatgtgttgttctatccctggaaagctatacctccttacccctatcagcttctcctcacatctcctctcgtcgccacccatgctatcaccgctctgatcacaagcaaggcaaaccctcactgttctatcaacgcccctcccttagctagatggcttcagcgaacaactggctgggcttctcgctctcgggccaggataacccgcagcctaaccaggacagctcgcctgccgccggtatcgacatctccggcgccagcgacttctatggcctgcccacgcagcagggctccgacgggcatctcggcgtgccgggcctgcgggacgatcacgcttcttatggtatcatggaggcctacaacagggttcctcaagaaacccaaggtgaggagcagaggctgcaactagccaactaacaatctctttggtctgattgatcgatgacctctcttgctagtttttctatcgtatggtgcactgcacgcgatattctatggggtttttttacggtttgtttcttgatatttgatgtgggtgctctcagattggaacatgaggggcttggactacaacggcggtggctcggagctctcgatgcttgtggggtccagcggcggcggcgggggcaacggcaagagggccgtggaagacagcgagcccaagctcgaagatttcctcggcggcaactcgttcgtctccgatcaagatcagtccggcggttacctgttctctggagtcccgatagccagcagcgccaatagcaacagcgggagcaacaccatggagctctccatgatcaagacctggctacggaacaaccaggtggcccagccccagccgccagctccacatcagccgcagcctgaggaaatgagcaccgacgccagcggcagcagctttggatgctcggattcgatgggaaggaacagcatggtggcggctggtgggagctcgcagagcctggcgctctcgatgagcacgggctcgcacctgcccatggttgtgcccagcggcgccgccagcggagcggcctcggagagcacatcgtcggagaacaagcgagcgagcggtgccatggattcgcccggcagcgcggtagaagccgtaccgaggaagtccatcgacacgttcgggcaaaggacctctatatatcgaggtgtaacaaggttagaactttgattagtttgtgtcttcgataccttttgttattgttcttcgtttcgtttcaaattggtccagtgaggtataactatattcagagaacataactttagcatgaccttgttctagtactactcgagcaaaataccatggccttgttgagcgatcaatccatggagaacataaaccatcagatctatgctagctaatgcaactttggagacagtagccatgctatttttcttcaatttttctctagtagttcatttatatatgatacttagaagataaggtgactagttctgaagtataccatttgtgtactaacaagtggatgcaatatactgatctatttttcaatatgtgctgcgatgacggcaacgtatgccactgatcacttaggtggttgagaacggagtatatatatatgcatgtacaatttgaaatggtactccttgtgtggactgttatagttgcttttattctatttgcaagggaacattggaagctatatacacatatgcaagcgtatttttgcttagtttttggataattaccatatatatatatatatatatatatatatatatatatatatatatatatatatatatatatatatatatatatatatatatatatatatacgtgttgaggttggtaataacaaatgtttttgaaaacgcactatatatatgcataattttgagtattcttgtttacaggcatagatggacagggcggtatgaggctcatctatgggataatagttgtagaagggaagggcagagtcgcaagggtaggcaaggtaatgaaacatatatccataacaaccactgcttatatcgtcatagaaaaaacatatatggtttgtacaacttgagctactgataaagtattgtgtcttttggttccattgcacacaccctggcttcaaacattgcctaccggaatgacaccaacaatatgcagtttaccttggtatgcattcaccttagctcctgcccttacatttttgttgttgtatagatcttcctattttaacaatcattttgctatgccattgtatatccactgtatacacttaggtggctatgacaaggaggacaaggcagcaagggcttacgatttggcagctctcaagtattggggcactacgacaacaacaaatttccctgtacgcaaagttctatatggtgtttctttgggtgcttataacagaagcattttgacttgttttttaaacactatatatattaatctttgttcttgaatttatttttttgccaaaatttcattgttgcagataagcaactacgaaaaagagctagaagaaatgaaacatatgactagacaggagtacattgcatacctaagaaggtattattttgatgcttgtgtccttgtcattggttcacttccatgaatgatttgactaacagttaatatgatcttatacattcagaaatagcagtggattttctcgtggggcatcaaagtatcgtggagtaactaggtaattaaacttcactagtaggcaatgtatgatttgtgtgcatacaaaaaaattgtccttttatttcacattatcattagatgcctgttgtgggaaaaacataactttacaagagatttatggaacttgtttttgtttcctttttttatattgacatcaatgttgttaatcgatcagacatcatcagcatgggagatggcaagcaaggatagggagagttgcaggaaacaaggatctttacttgggcacattcagtaagctagctagctgccttcttttcttgtttgattgttttgagaactcagtgaagctagcacccattgattagtgattaatgcaactcataaaaactaattgctcggttaatggagatccttaggttagttaatgactactcatagtgttatatatgtccccaagatctaagtcatctcgccccgccgtacttgtttagtcaaatttcttgaaatcttcgtctcgtagaactgaagattagatattctatatgttgccctatgggagcataaaatagtgactacaccattaactatgtcccaaatgtacctttccaagtttttgtctcaaagttgtctgagaaaatcggggcatgcggtcaaaggggtcgagcagaaaaccctagtgctttgaatggcacagtgtgcacccggcctgctgcatgcatgcaatatcgtcgtgcattggggaacgacaaccctaatcatgcaccctgtgctgtgaagctaatcgtcgtgcacattccctcgtacgtaggcaccgaggaggaggcggcggaggcctacgacatcgccgcgatcaagttccgcggtctcaacgccgtcaccaacttcgacatgagccgctacgacgtgaagagcatcctcgagagcagcacactgcctgtcggcggtgcggccaggcgcctcaaggacgccgtggaccacgtggaggccggcgccaccatctggcgcgccgacatggacggcgccgtgatctcccagctggccgaagccgggatgggcggctacgcctcgtacggccaccacggctggccgaccatcgcgttccagcagccgtcgccgctctccgtccactacccgtacggccagccgtcccgcgggtggtgcaaacccgagcaggacgcggccgccgccgcggcgcacagcctgcaggacctccagcagctgcacctcggcagcgcggcccacaacttcttccaggcgtcgtcgagctccacagtctacaacggcggcgccggcgccagtggtgggtaccagggcctcggtggtggcagctctttcctcatgccgtcgagcactgtcgtggcggcggccgaccaggggcacagcagcacggccaaccaggggagcacgtgcagctacggggacgaccaccaggaggggaagctcatcggttacgacgccgccatggtggcgaccgcagctggtggagacccgtacgctgcggcgaggaacgggtaccagttctcgcagggctcgggatccacggtgagcatcgcgagggcgaacgggtacgctaacaactggagctctcctttcaacaacggcatggggtgacgacgacggtacggtccaacgaacggagagggcagaagctagtggctagtgatagggggttagctagctagaagatcccaagtctaggttagagttatttggtcatcgttgtcgtgtttcgacgtgctcaggttctggttcgattctgcacaattaacccgtgcatgcacgcgtgtgcctttctggaagctggtaatggcaggtcagggtaagtaaagttagtgttgtaagttatcctgatgtgctgttaattttgggtagtttcagaaggtctagccaatctcttcggaggactcaattgtcatcttgcttgcactcgtgcttatgagaataactttatcatatttcatttttctgatcacgaagttacttttattcttctagtactactgtgttcgtcgtctgtagttatatatatcatcgttgacatttctacaccataattcttaagagatatcaactccgtactgttgccctgctgattagctaccgaaattgtgaccgcgagaaaagacaagcgagataaccgatcgagtgctaataaagcattactagctacaacaagaaggaactgaagcaaagtcaagctagggacagatcgagaacataaaatcaaccggaccaatctaagggggtgtttgtttgggattataatccacctagattatataatccaacaatttttgaactaactattagttcaaaagttgttagattatataatctggatagattataatctcaaacaaacaccccctaagcaacaacattgtctggaatagctaatctgtcgccactctccgcacgtacatttcattgaaggaagcttaacttctactaagcttgccatcaccgcatgcgcgcatgccaccgtgaagggaggcatgcacccacctctgccgcacctatgccagggtcgtagtcgacaaagaggtcgtttacgatggcgtattggcgtgttacattgatcaattctaggcggttgggccccaattgaacctatcgatttacatatatttgcggcttccatgtagctagatcatatgtttgttctaaggcaaactatttaaattttgaccaacaatatatacaagattaaattgttttaaactaaaagaatatatattataatagctcgtcataatgaatctagtaattttccatttatgttgtaaaatcatataaaacatctggtataatcggtcaaaaatgacaatgatcgacttaagacaaacctaaaaataaaaactcgcgtggccgcaggtagtacttattagttgtttaatgagc

SEQ ID NO: 594 - protein, 679 aa, Zea mays
MASANNWLGFSLSGQDNPQPNQDSSPAAGIDISGASDFYGLPTQQGSDGHLGVPGLRDDHASYGIMEAYNRVPQETQDWNMRGLDYNGGGSELSMLVGSSGGGGGNGKRAVEDSEPKLEDFLGGNSFVSDQDQSGGYLFSGVPIASSANSNSGSNTMELSMIKTWLRNNQVAQPQPPAPHQPQPEEMSTDASGSSFGCSDSMGRNSMVAAGGSSQSLALSMSTGSHLPMVVPSGAASGAASESTSSENKRASGAMDSPGSAVEAVPRKSIDTFGQRTSIYRGVTRHRWTGRYEAHLWDNSCRREGQSRKGRQVYLGGYDKEDKAARAYDLAALKYWGTTTTTNFPISNYEKELEEMKHMTRQEYIAYLRRNSSGFSRGASKYRGVTRHHQHGRWQARIGRVAGNKDLYLGTFSTEEEAAEAYDIAAIKFRGLNAVTNFDMSRYDVKSILESSTLPVGGAARRLKDAVDHVEAGATIWRADMDGAVISQLAEAGMGGYASYGHHGWPTIAFQQPSPLSVHYPYGQPSRGWCKPEQDAAAAAAHSLQDLQQLHLGSAAHNFFQASSSSTVYNGGAGASGGYQGLGGGSSFLMPSSTVVAAADQGHSSTANQGSTCSYGDDHQEGKLIGYDAAMVATAAGGDPYAAARNGYQFSQGSGSTVSIARANGYANNWSSPFNNGMG

SEQ ID NO: 595 - DNA, 5514 bp, Zea mays
cgacttcgattagtatatacctgcatgaggcatgttcaggatgtagctataggtgagagtagtagcaacacgtagatgagttagacatatgtgcttttagagattcaagtgctaatgtgttagtgtcatagttagttatccgtacgagtaaataaacatgttgtaatggacaaatcatgtggtaatttctaattaggtgctaattagtatgtatgtttttcttttttttcattttctactatcttagaatcagtctatccaaacacctaaattctaaccaccagcttcttcccatagcacctaaaccaaatactcagattcttcttcttcatagtcagattctctctacaaccattttttcaaaaaagctgaatcaaacagactcatagacacacgatgttcttgtctatttttatctttagtactagtttgacaattctatttaaaaaaaactattttctcgagataaattagctggaaatctcttagactaactccaacagagcagccaaagccaatatggctgtcgtggtgctactgtagcgcctagaaacaggttccaacaacacagccaaaaggagcagctattttagaggggatgagagagaaaagctagattggctggttcagagccggcagccattttctccccttcgtctctgacaatccggacccacttctgaggcttctggccactcgccctgggaaccagctattttagctgctccgttggatacgaaggacgtatggatggccagctaaattactgtggcaagccaacggcctgaatgtctgcccgttttggctagtgcctgttggagacagccttaggagttgacaaactaggggctagtttggatcggcacgccggcggccacgccgcgccacacctgtggcgctgaaaacgagcgccacactggtggcgtgggaagtgtggcgggcggcggcggcttaggcggccatccaaacatcccctagaccttaaccaaacattcctcccttctcgcttgtgtgtaacacccactccgtatttttcaccagcgccaccacggtaaagtgcacgctgttcctgcgggacattactacaaaaccaatcccccgtcttgcgaggtcgcgagtctctccaactccgtccctctggcctcagcacaacgccagaccgcctgcctgtgcttgcagccaggccggccagctgcctgcctgcctgttgtcgtctgcggcgcgacggcggccgcccggtcgaccgcccgcattgggatccccagagcagcgcttggcataggggaatgtcccgggtcagccaccgtcgcctctgcgctgcgaaagccccgcatttacttgccacctagaagggggcacccctcgcgagacccagcgccagacagagccagcaatggctgctgctgctgctcctcctcctcctatatagcggggcccgtgccgagcgctcgatccagttcttctgatctctgacttctgagcgaggagtggacgagtggtgtgccgtcgtccggttcccgttggtttggcgatgaggcgcgctcgcggtcgccgcgggctgctgcttctcctcggcgtggcgctctcggcggctgcgctgctccgtggctgcgcggggcagcaaggggaggacggctcggacgcccctgcggcggcggcggcggagacggcccccatggaggagaaggagcgcagggcgctgtacgccgccatcgagagcttcgtcggcaaggggtggaacggctccgggctctacccagacccctgcggctggtctcccatccaggcgcgtccctgcccttcctgcgctttccctttcgcatcgatctatgttaccgtgctgttcgattttctggcccgcgtatgttcgttcatcatgttcgttcttcagacgcgcgaagctttcctctttggttttttcggctttgcccgtcctcgtcacacgccctttctcggtgctcccctgctgcctgctttgagctccaatccaaaaaccgtttgcgagcgaaaggaggagcaagtcggtagcctccgaaatgaaattggtgccctgtttggggatgcaggacgcacgccaagtcgccaccaaatctcctgctgtaatttcccgtgttaaaaccttcctcgtctcgcttccagaatttctggccttccggtagcctctgctgtttttgtcttgtgttcgtccttcgtcgcactcgtgccctgctcctcaactgttgcttcgagattgtggcactgttttgctgtgcgccgctgcacattcagttcactgttggacgagacctctgcttgatccccttgtgtcttcgcatctcagccttttgctcgatatggtaggaggatctgatctcttgggcaggaactttccactcacatgaaaagaacctcccatgatttgaaatggcatgctccgcccaagatttttctcatacagtactactactctctagtatagattttagtagtaccttgacatcttcttccttttgctcgcgcccgagaaggaatcagtcctactactccataggagtttttgctctaacaattactggaatttaccgcatatttatcttccttcacacggtacactggaatttcattctggttgttacagtaccagtaaagttaagaaggggccaaatttgtactaggtgcacctttaagaaatgtcgccatcttggatcatcctcatccatgtctgttattactgctagtagttactgttgagcttgtgtttactttccgagtaggacactctcagattgcagcgtgcttgcctgcctgttaaaattaaggggattcaatttcagtggattgagcagatgtggttcttggatgccaaaaacctgtgcagggggtgtcatgtgatctcttcaatggcctgtggtacccaacagtgatgagcattggcccagtccttgacaactcgctgcagtgcggccccgacgccaagttcagcgcccagctgttcgacctgaggcgcctccggacgctgtctttctacagctgcttcccggcgagcaaccccacggccatcccgaccggcagctgggagaagctggcggggacgctggagacgctggagttccgcaccaacccgggcctgaacggcgccatcccggcgtccctcggccgcctggccagcctgcagtcgctggtgctcgtggagaacaacctgacggggcccgtgcccgcggagctgggcgcgctgtcgaggctgagacggctggtgctgtccgggaacgggctgtcggggccgatcccggtgacactcggtaacgaccgccgcgccgacgagctgctgctgatcgtggacctgagcaggaactatctaaccggctctctgccttcgtcgctaggtggcctcacggggctcctgaagatggacctgagcagcaacctgctgcagggcagcatcccgccggagctcgcggggctcaggagcctcacgctgctggacctcaggaacaacagcctcaccggcgggctgccccagttcgtgcagggcatggcgtcgctgcaggacctgctgctctcgaacaacccgctgggcggcggcctgccgcagtccggctggggggcgctggcgggcctggccacgctggacctgtccaacgtcggcctcgtgggcgccataccggggtccatggcggccctgacggggctccggttcctggcgctggaccacaaccgcctgacgggggccgtgccgcccgagctcgcccggctgcccagcatcggcgcgctgtacctgaacggcaacaacctgacggggacgctggagttctcggccgggttctaccagcgcatggggcggcggttcgcgtcgtgggacaaccccgggctgtgctacaacgtcgcggccgtggacgcggcccacgcgccgtcgggcgtggtggtgtgcaaggacctgcaggagcccagcgtgggcggcggcgcgcgggacggggacggggacggggacgcggaggaggacgggacgaagcccgaggcgggctccagcctcgtggcctcctcgtcgtccggcatgccggttggcagtgtcggtgggctccggtacctggtggtggttcggggaatggcggctgcggttcttgggttggtgtccctcctacaatagcaagcaagcaggttcagaagaagaacacggagaaacttgaagtaatgctaggtaggttagcacgaagtagtttctgcgcgttctctgtgatcttttggcatttgtttttggctgctggtggcttaccatcgtcagatggtgacggaggaaggagggaacatggatctggatggtgtgagccacagattacattacagtagtagagtaaactatgagagttcttgtggactgaaggtgtgtagtggtggatagggtagcttctccggggttcttttgtgtgtaattagcctgtgtcgccctgtggtgtcatgttacaacagcaagtggaaatctaagctggttcgtccgttgttggagaatcagaaaaaaaaaaattgtcgtgcttcattcacatcacatggatacacagtttcctgttcttggagcagaagaactggaaagatctctcgttatctctatttgctatagaaagaacatagcggcggtatctgcagacgatacaaatggaagaagagcgggcaagcagcacgacaggatggagcggcggcgccgccgcatatgtccggctgccgcctgccggcgatctcggtgtctcctgctgccttttgcctttgcgtgttctcgagtctgaaaataaaatcaaaaatatggaccgagacgctgattgcgcagggccccgcgctcgcagaggagtcagaaacagaaaggacctgtcaccttggaaagctggcggccggagcggagccctcacagacaggctgcgctctgcctctctggcactggcaggcggcagcggcagtagcgctagtcctctacaggtggaggctggactgcacctcgacgtgtaggaactgtagcgtcattgtggtactccggcgtctgtaccggtctactctacacttttccatcccagtacgctttgaaatatttacaaaaaataaatgtatttaatgatgatatcactagctctagttgtctttttttttattttatcttctcttaaaatacaacaagtacactattatagatatataatttatcactaacattatttattttgaaaacgagggagcaccggagcagtactctgtactcctagtgctacgcaatggcgcggtggcaccacgcaccaggcaccagcctgcgggtgcaggtataggcgtgctagcacctagcagtatggggttgggctgcacgtcgcagtactagcgcgtagaagcaatcgatgctctcgccgaaaaacaaaggcacaggatcagtggcacagctcgtaatacaattgtcgtttcctccaaatgattttggatttagttaaattataagaaatgctaacagttagcaagctgtttacttggctttaatccaaaatgacctcaactgtttatacagta

SEQ ID NO: 596 - protein, 478 aa, Zea mays
MRRARGRRGLLLLLGVALSAAALLRGCAGQQGEDGSDAPAAAAAETAPMEEKERRALYAAIESFVGKGWNGSGLYPDPCGWSPIQGVSCDLFNGLWYPTVMSIGPVLDNSLQCGPDAKFSAQLFDLRRLRTLSFYSCFPASNPTAIPTGSWEKLAGTLETLEFRTNPGLNGAIPASLGRLASLQSLVLVENNLTGPVPAELGALSRLRRLVLSGNGLSGPIPVTLGGLTGLLKMDLSSNLLQGSIPPELAGLRSLTLLDLRNNSLTGGLPQFVQGMASLQDLLLSNNPLGGGLPQSGWGALAGLATLDLSNVGLVGAIPGSMAALTGLRFLALDHNRLTGAVPPELARLPSIGALYLNGNNLTGTLEFSAGFYQRMGRRFASWDNPGLCYNVAAVDAAHAPSGVVVCKDLQEPSVGGGARDGDGDGDAEEDGTKPEAGSSLVASSSSGMPVGSVGGLRYLVVVRGMAAAVLGLVSLLQ

SEQ ID NO: 597 - DNA, 3646 bp, Zea mays
gttaaagatctaaaccggaagaatgagtgactaaaataataaaagtgtacccttttagtcacttttagctcctaagaagaagctaacctttaatcagtttgcttttaacccctggatccaaacaagtcctaaatcaccggtataactaggcacaatgcctcatcagacagccaactgccaatcccaaattctactttgttgtccatttctaattttaatgcctctgcctgcacgtatactatttttgtttttgattaagtcataccacataggagaatcactcaatttattagtaattgtattgtatgaactgaatcatttggcgtatatttggctttctttaagcacaggcacactgctaccaaaagcattaggcgcttaagcatcacccttgtggctggcacgagaaccatttgattcacgacagatttagcgcttgtttgaagtgttggctaaaactagcaatctacagggaagaacaccatacattagtactccgtcgggacacgccaccacatgccgctgaaatatatccgcaacgattctcccagctgcttatagctcagaagcaagagccaaggccggcagctaaccacgactcgtctaatcatccctggaccatagcgattaataaattgattaagctagtacatcgcccctagatttccggcagaattaagaaaaccgcgggcagcagagccgatgccgatggcaacaaagaagaaggggctgttggtactgcagccgcagtctataaagataaaaattgtagaagtagtaggaagcttagccggagctggcatggcaggctgctgctgagtgagcagcggtgggggcctcctggctggcgcgtggaaaaacccgagcaaatggcagcgtgaagcacgtccgagactgaggtcaggcgtcgggcgggggttgcggccaggggagacgaatgaacccctgcccccgcctggatcccatcgcaaaagccccctccccctctccgccttcgcgcatattatattcgcgcaccatcgcagcaacttgcacgggcgccgatgactagttgcgccagatgcactgcatctgctcggcgtggtgcctccaacgtccaacccctcttcctcttgtctctcgtctacctctcttctgcccctctgcgtccgtgtctccatcgtcgtcgctgcgtgaggttgacgacgaccagtcacaggatctgttcgttcctcatgcgacccagctagctaaaactggcatgcatggacatgctacgctgctgcgtcaatccatctcaccaggtacgctgctgtacatgctgctacgagcctacgatcgatagcagtctgtgccttcctttgctcgatgccgatgtttatctgcatgtgatcgtattcgtatgcacggccctccgccctctcaagctgagtgctttttggtgggcccatcgtcctatatacgctcatcagttcactgacgacgatataacgactgttggggttcagaaactacatattgtggtgctcgcccgatctctttcttgtatattcttcttattattagtctctctctctctgaaagaacaaggaactagatgtcttgttttgtgcctcctactatacctttgcgtgtttttcttgcttttgtccatggcttttcaccggtctgctgggtgaagtaatttacacgcatgtcttacgcacgcgctccttcagttgtccgcatatctgatcataacatcgcttcattcatgtgctgacgagatatttttcgccgccgagactgcagtgctagctagctagatctggcctgattcgccgatcgagcggtggtgagacggagtgcttcagctcaaagactgctagtggtaggctggtagctagctgtgtgcctgtgtgcagtgtgcactgccactgcatgcgcggcgccttggacttaagacggcagcacacgcacgcgaggaggcgtcggctgaagcgagcgctccggcggctccgcttcgctcatcaggttcttgagccccggaaacgatgagcacgacccggccggaggacacccagcaactgatcaacagtgccgccgctagccccaaccgcagcgcaccgtccgccgcgcccagcgatatggagaggggcagcggaaccgccgcgtcctcgtcgcgcgcttcgacgacgtctcactcccaccagagggccacccacagggtggtggaggaggaggaggaggaggagcctagtagcagccgtggcggcggcagcctctgctccgggtacctgtcgctcccggctctgctgctcgtcggcgtcaccgcgtcgctggtgatcctcccgctcgtcctgcccccgctgccgccgccgccgtcgatgctgatgctggtccccgtggcaatgctgctcctgctgctcgtgctggcgttcatgcccacgtcgtccaccggcggccgcggtggaaccggaccgacctacatgtagataatcacatcggttttttttttcctttctttctcttgtcgtcctttcgtttggattttgtgacagagggaggtcttgcgatggatcagttagtcctcagcttctgctcttctcgatcgtacgatgtctctgttcggctaattaatttgcataggggtatatatatgctgcctagatcttaaaagtatttaactctttttttgcattgttcaagttctcatcatttctgcactctgttatggtctccactacattatacaacacacgtacagcatttgggtaggtgatcgaccgtgtgatacatatagatggccaatagccggcctggagcacggcacggcccgtagtacctgggcacgacacgatacggctggagccgggttcgtgccggcacggcttgatgggtagtgtcgtgcctgggccgagcatcgcgtacgctgggccggcacgggcacggcccgattagcccctaggcacggttagacactattatgcatgattagatctaagcacgactagttagctgtgtgttgtactcttttttttctatctagggttttctcaaaagggtaagtttttacctagataggtttttaatgagtcagtcattgtactaaacagctcaatattaactattttagtatgttttaactgtgtttgtgaatgtctgactaaaattttgtggtgtagtgctaaacgggctaaacggttctaccgtgccggcacggcacggctaaggagccttagtgccgtgcctgggcctaagttcatgcactagtgccgtaccggcacggcacgcctaataatcgtgctaaacaggccgtgccctaagcgagccgtgcctggtcgtgcccgtgccgtgtcgtaccggaccgcccgtttggccatatgtagtgatacatacgcgagcgaatacttgctaccagctcaccatgacaaaaacggttacaaaaatcaaaacaacacttttttcccctgataataattaaataatattgatcgcactttctttttcgaagatactagtatattacacgcgcagacctcttgtaaacgtaatacttatatagtacactcacgaccttactttcaccaccgaaatcctcccatatcgtgggggttttttttttgtcattgttgatgataaatagtcgggaggcaatcaggcaaagctcgtcagcatcggaccaaac

SEQ ID NO: 598 - protein, 146 aa, Zea mays
MSTTRPEDTQQLINSAAASPNRSAPSAAPSDMERGSGTAASSSRASTTSHSHQRATHRVVEEEEEEEPSSSRGGGSLCSGYLSLPALLLVGVTASLVILPLVLPPLPPPPSMLMLVPVAMLLLLLVLAFMPTSSTGGRGGTGPTYM

SEQ ID NO: 599 - DNA, 3201 bp, Zea mays
taatttagctagaaggcgttggaatggtagcttgacctgtagcttttgcaacaacaatgagagtatacatcatctcttttttgattgttacattgccaaaagtatatggagaatcatttactttgctttaaaaatagacatgcccattagcattaatcatattatcgggtcttgggaatctaataatgctctggcatacaaaacattattactgactggaatatccgctttattttggtccatctggctctgtcgaaatgaggtggtgtttaatcataaaccaataccatcaattgtgcaggttattttcagggttactcactggttcagattctggagacttctacagaaggaggaaaagcaccaacaaattctcgatgcctgtcgagctttggaggtggtggcgatggaagtttttgcaatgcatggatggcgctcgaatgcaagaattgaagatggctagtgttttctatagtcatggcattttgttttctttgagttagtttaattattcaagcaattgctctatggtccaataatcgttatgtaatggctgtacgcatttgtatgctaaagccggaactcttgtttccataatcaaaaaaaaaatagaaaagacaatacatgctgctgcgactgtgcatcggaatcgcgggatgtgcaaatatactaatgctctcgtgtttagtgcagtaaccaaacccttccttgatttgatattaaggaactgcatctgcatcggattcccgttgaaaagtaacgcggcattatttattggtatggtcacctaaaatactattttataatatagaccgtattatttatataatagattttgaaatagataatggagataattaagctgttgaagatagcctttaactagttagtaccgcagtacgtgagtggtgacttgagggagacctctcgagtcgagtcttgccgacctggggcctgctgcgcctggatgaagagctgtgctgagagaatcattaaagcagcaccgggtccttgctttgcgcgttgctgttcgcataaacaagagatcctagttctactcccaagcaatgtatccgtcagcccctccggacgcgtataacaagttcagcgccggggctccgccaacggcgccgccgccgccggcagcgtaccagcagcagcagcacggggcgaacatggacacttcacgccccggcggcgggctgaggaaatggtccaccggcctcttccactgcatggacgacccggggaactgtaagtcgttcgttcgttcgttcgttccccttcttctccagatacatacagttcaatagttcataggaggccagacagattccagtgaatatggctagctattcgagctcagttagttaccacttgacacgcgtttctttcttccatggcgcccacgcccaggtctcatcacatgcctgtgcccctgtgtcacgttcgggcaggtcgctgacatcgtggacaagggcacctgccgtgagtcaatcaatctctttcctctggttttctctcctgaaacaactcagtcagatctcgccgactcactgtggctttggcagcatgtatcgcgagcggactggtgtacgggctcatctgcgcgtcgacggggatggggtgcctgtactcgtgcctctaccggtccaagctgagggccgagtacgacctggacgaaggggagtgcccggacatcctggtgcactgctgctgcgagcacctggctctgtgccaggagtaccgcgagctcaagaaccgcggcttcgacctggggatcggtaagcgcatgcagtgcaaattgcgttctattacgtgcgtgtgtgtgtgcgcgcgcgcgcgctcataaccatacggcctgctgaatgtcgtcgtcctcgtgtatgtgtttgtgcgagaaggctgggaggctaacatggaccggcagagacgaggagttgccggcggcggcgcggtgatgggggcgccgccggccataccgctgggcatgattaggtagatgattgattgatgcgaaatggcagaacttgctttcgtggttcttttgtttgactatgtaatgtatcttcgtttccatcgattctatgtaatttaactgtccttttttttgctctctattgtggaggacgctgggtgtgaatagcactgttttggatgggtttgtgattggtctagatgacttatataaggtgcttgtatacattgtttgtagaggggagttctaaatacgacgtgacatagagaatataataggagagctgcaggagtgcgtggggagcgtggttgcatggtgtcacctttccatgtgaccaacgatggtgacagtctggactggaccacttgattagcatatgcaacaacacaccagcaccagaagaagcaatgcgatgcgacggtggattggagtgtattgggtcagatagattggaggtgagcacttacctgactgaagctccaggttttgtggtgtggccggcgaatggcgatcacagagaaggtttcagagattggtccggcaggcaggcagtcatcataccaaaaggacgtggttcgtccatcacccaccttaaccgacgtaatggcctgataaagcgggaggagggtttgcagtttgtcccaatgatctccagctggcttagctagcgtcctggtccgattgaatccagcgtgtccaagaggatgacgcgggtttgtgcagtttgtgaactagcttcaggagcaagcagcagttctgaacatgcatatcagtcacacctaaacctccaaggagctttcttttgacagactttatcccaggagaccagacaacgcgcaccagtggtgttatcacgaccattccagaggaaagcacggcggcgggagtcaacctttctgacgatgccacaggggggatgagcaatgctgacatgacgtaaaccagctgtgaggtaagcaatgcacggagctgacaaggaccgttcgaccggccgggttcaggagaagagagctccaaccggagaggaatcggtcggatttcggcagtaaggtattgtggatagacaatttgattttcgtggttgacaatgggagacctagatatagctcaaggggagactttcaagtttgcactgcaacaccgagatgcaaggcgcgatgcattttcggagctggcatggataggggctaggctagggtactcttgtcgaagttgatattcag

SEQ ID NO: 600 - protein, 191 aa, Zea mays
MYPSAPPDAYNKFSAGAPPTAPPPPAAYHQQQQQHGANMDTSRPGGGLRKWSTGLFHCMDDPGNCLITCLCPCVTFGQVADIVDKGTCPCIASGLVYGLICASTGMGCLYSCLYRSKLRAEYDLDEGECPDILVHCCCEHLALCQEYRELKNRGFDLGIGWEANMDRQRRGVAGGGAVMGAPPAIPLGMIR

SEQ ID NO: 601 - DNA, 3046 bp, Zea mays
ttctaattgaataatggtttggttgaatacccgctgccgctacattttcctgtttgaaacatcacgaagacgaaattcgagatcccggaagcacaggtatgcagaaggctttgtttatgcttctagtttagcagacaaacaaatacttacaatcaatgttttttttttgtaaaatccaggaaccaattcatgaaaggatatcaaggaatgtcgctcaaggcttacgggacctatgattgctgatagaggatcctggggcagagtttgctgtggggtgcatctctggtaccaatattcccgtgagagtagtaagtagtatgcgcgcatgccatatgcgcgtcctgtgagggttgccattgcgtcttgctgaagcagaggtatccgcatttctttacgatctgtgatgtaatgtggtaataaactccaactggaggtggttgtgtttatgtgattgtgagcaaccgccatgcgccgctggtgagatttgccgtgtttggagcacgaggggagataaattgaaaattgagttttttaagctggtgtcttcggttttgctggtgtgctcatttttatcattagtcgtgttttttgttcagttttgttttgtccttctgttctatagcactaaaagggtaaaattgagtaaaaaaacacaactaaggataaaaataagcacatcagcgaaattgagggcaccctcttaaaaaaacctttcaagtggtttgagtcgtgcagccatcactctgtcacgtacctttctgaaatggaacgtgtaaaattgcaaataaccaagttcattatgttttagcgtaattgggcttttcctctgtagtatttttttcttcaagaggcttcatcagtacgcaacactcccagtaggctcactctgatgtccttgtctcccgattatactagtaaacaacacgggttcccgtggtctcctcagaaggcaactatgacccggaacccctacagttgacttgtcatggcttcgcgatctgtgactgtgatctatactataaggtgaacaagatctctttgtctactgtagttgcagcaccagcagcagcagcagaagagcagcgcctgagctccagcaataatggccgagaagggcgtgaaggtgttggggatgtgggcgagccccatggtgatcagggtggagtgggcgctgcggctgaagggcgtcgagtacgagtacgtcgacgaggacctcgccaacaagagcgccgacctgctccgccacaacccggtgaccaagaaggtgcccgtgctcgtccacgacggcaagccggtcgcggagtccaccatcatcgtggagtacatcgacgaggtctggaagggcggctaccccatcatgccgggcgacccctacgagcgcgcccaggcgaggttctgggccaggttcgcggaagacaaggtacgacgcgcgaactgcggtgcagccacatgatctacttactgacgcagggcagccggacgagccccgcgacgactgacttctctgtactctactctagtgcaacgctgctctgtacccgatcttcaccgcgaccggcgaggcgcagcgcaaggcggtgcacgaggcccagcagtgcctcaagaccctggagacggccttggaggggaagaagttcttcggcggcgacgccgtgggctacctcgacatcgtcgtcgggtggttcgcgcactggctccccgtcatcgaggaggtgaccggcgccagcgtcgtcacccacgaggagctgccgctgatgaaggcctggttcggtcggttcctcgcccttgacgtggtgaaggcggccctgcccgacagggacaggctcctcgccgccaacaaggcccgccgtgagcagctcctctccgcgtagatatggctagtaattctggagcagctagtttcaccgccgacgctcatatattgctgaataaggactggttgcacttttgcacgttgtgcagtgcagccgaggtttggatgacctctgcccctctgttccatttcagaatggtagtcccataataatgcatatacatcatgcataaccttcgtggcaccgcacggtgcgtcaaactgttggcctgttgcccaatcccagtagctgattttcttcaggcgtgcaaggtagcaacagaaagtaacacatagaaacagacatttcttcttttttttatattcgttcagattagatcagtcctgtactgggatcggcccacaaagtgcgccggtccagacttactgtccgaaccgaacgtggtactgccaaggtacatctacacaccatgcagcacagtattggccaacgtccaccgccgaacagaagagcacccacaccagaagcgacagctgcaggtgacgacgattcaggacgctatccacgtagcacacagcagcgatcacaatcacaacatatactgatatacacacaacggggaagatcgaagaggccaggccaaagtccgcagcagcatcacgggttcgcctgctgcagggcctccgcggctgcggcgccctcctccgtcctggtcttcctcttcttggccctggcctcgctccactcgccgtaggagtaggacgcgaggccccagagcgagagcaccagcgccacgcctttctcgctactgaacctctcgcgcaggaagatgacggccgccacctccgtcaccgggatgaacaccgcgatgaggatgcccgccagcagcgtgtgcacgcagaagatgacgcccaccgcgcccaggaagaagcactgccacagcaccgccgaccacgccagcaccgcgtagtaccgcgcctccccaagcttgtaccgcctcgcctcccgcgggatcgcctgcatgcatactttttttcatttatatttctccagcgtttccctttactgtgtgcacagtgcagtttgtgcatcatgcatgcggccatgaccttctttatccttgaaaaatatgtcatgtcatgcgccatacttttccaaatccaaaaaaaagaacacgtgttggtcgtgaacctgcattcttgttactatccctatcagagactatcagtagc

SEQ ID NO: 602 - protein, 222 aa, Zea mays
MAEKGVKVLGMWASPMVIRVEWALRLKGVEYEYVDEDLANKSADLLRHNPVTKKVPVLVHDGKPVAESTIIVEYIDEVWKGGYPIMPGDPYERAQARFWARFAEDKCNAALYPIFTATGEAQRKAVHEAQQCLKTLETALEGKKFFGGDAVGYLDIVVGWFAHWLPVIEEVTGASVVTHEELPLMKAWFGRFLALDVVKAALPDRDRLLAANKARREQLLSA

SEQ ID NO: 603 - DNA, 2631 bp, Zea mays
gatatatggtacattctgaactaaaaagaaacatagcactctgttaatgaaacagaggttgattggtatagatgcacaagatgccgaaagactgtagtttgtgatgaaggggttggtccggacgattgtaacgtgacttatttatagatgccattgcatagtgtttgtctcaagcctcatgtgtaattgaatcacgatagataatagataaaagatgttgtctgtttctgttcttgtgatccaagtatacagctcccagcatataagcattggaaagtttctgtatctgactcctatgatcctatcagcagttgccccaacagcatctcaagttttcaacacagaacaaacaagatcacagctgctccgcctgtgtggtcagttcatctagttcttgtcagagcacgcaacgccgtgtcagccggtgctagtttttattccgaaactgattctatttttttacagtattttatctctgaattgtagcagtagcgttcgaacagctggtttaactggtttaaagctgcagcgaacagaattggtttgaagataattttaacgtctcctgattacgcattcccatgtgcgtacatgccgagtgcattcgcgtatatgctgaactctaaagccttagacgagtctccgtgtaccaatggattgaatatggcaatccaaaaaggatttcgcactaaacgagctacacttgaaattaggaataaaatatttttttaagtttgggtaaaataaacaaacatctagagttatcctaataactcagactatattttaagttggaccgaggtagcatttgaatgaattaatggtttactgccttgtttagaggtaaattgaagtcgaacgttaaataatgacaaatgaaagaagccaccaggataccgcgcatttatctcatgctaatctttcctgctatataaaccagaccaaccctgcaggctgcagggtgaagcagccggtagtactcaaccctcaacacacccagtcacaatggcgacatccgtgaagcgcagccacagctgcagatgccaagtactcttcctgcttgcgttggttcttctggcattcgtctctgcgagtcctacacccatcagcggcaagtagtgcacgactcagtctcgtattttggccatatacgtttcggtttgtacccgtcgtcggttcatctgttccttttccttggacatggagaagatcgattacatgtctgtttgcgatgttcaggtcagagcattgacgacggcaggaagagcaagacaacggtcgtcgtcggcggcggcaacgaggcaatcgtcgacgaggacaacgacatattcaacgggtgccactacaataaccagaatccccattattcgtcggcgctgttctgctgcagcaaggacaagctgtgctgggcgtcgttgccggagtgcgccgccaactgcccttgcaagacgaactgctagacgatgatgagcttcgagtctccagttcatacatgatccatggttgtgttattggatgaagatgtactagagaggcaatcgccaaagatgcagtcttgatagcaactgagaataatcgtacgatagatattgggctaaaccaggaccaggagtatccaaaaattgttttatagcacccttggccccggcgccccgccctcaccaatcatgcatgcgcactgctccacctcacgccgcctcctcctctccgccccctcgaccgcgcttccactaccggtggtcggcggctctcgctacctcacctcacgccgccgcgatctcattcctaccctctcctgaccacagtgttaccaacgaccactttgccacgacgcctctgccctagctccgcccaaccgttgcctcgaattgcatcctctcatgacccgattgtatcctctaatggcaaaataaacacaacacatcaccttggaccttaccacaatgcgggcgatccaaatttttccttgagactcttaaaaattctagttcaaaaatgaatacaaatagaggctgattataatccgattcgatccttaaattttgcttacattttgtagtgtaaaatctagagcccgttatcacccctaaccacaccgcatcacatctattggaaaatatgacatatgctcaatcccccaatggatgtgacggttatctcgccaagcaacacaccttttccttcacttttatatatatattaggtgagtgcccgtgcgttgcaacgagaccactacattgcaacctttaatatcatacagacttctctatatgatagtacaatacttgcacattgctacggtttatatatatcataatagctacatgttagatcaaggacacacataattgagaggtaaaaattagattccaatactttctcaagtagtttaactcaaattttagcccgcccgtcgtctgggtcgtcgtcgagcccgccgccgacgcgcccgccaccgccgaggtgctccgcggcaccgacatcatgtacaggcacctcgccttcaagcccgaggacaacttcaccaccgccgacaccgaggctcacgtgcagcggaacgccgcgctcgcgcacgtcgagaagcaccgactcgccggcgtcctgcacttcgccgacgcctccggcgtctac

SEQ ID NO: 604 - protein, 108 aa, Zea mays
MATSVKRSHSCRCQVLFLLALVLLAFVSASPTPISGQSIDDGRKSKTTVVVGGGNEAIVDEDNDIFNGCHYNNQNPHYSSALFCCSKDKLCWASLPECAANCPCKTNC

SEQ ID NO: 605 - DNA, 3216 bp, Zea mays
attttgttgcgttgtttcatgattaagtaataaaaacaagagatcaacactatgctcttttcttaatcgatcattctaaaaagtacatgatttttgtcgactttacacccactcaaaattggtgtaagcacatgccatacaagaggttcatagaaacgattatcatggccttaaagaaatataagattgtctacagcatgaaacgttctagatgggtggtggatatttttaaattggaaaataaaattcagactgatgcttcaattgacataaaatgatattttctccgtgccaccttctcagcaatttaattttttctatgatttccattacatataacatagttggcaaaacattattatgaaggattaacaccagctacctcgttctacaagctatgtccatgggggtaataacaggcgaatggaatttgttaggggtgagtggagtacgcatgtttcacgttcaagtatacattaataaaaacattggtattttgttcacttatgtctttgtgtgtaggatgtatatattcttccaagaaactttatgatcgatctgttaatttatgaggacaattcgtgccgatatgtcatccctccaaacatacagcatagacttatcaatatcgctaaagaggattaaattagtgtacggttgtcgacatattcgtctatcattaaaaattctatattgactatttagaaataatttgtatgatattgataatgttcgatattatttcaatctattttagtcagcgtatttataataattatatatttatatcatcaatataatattattgttatgataatattttatagtacgaattttatatattatgaaatatcgtttcatatatatgttttatattaatttttctaatttacttaagcatctgacgctaagtgtcctgtgcccggatcggccagagcggtcaaatggttcaatgctttacctcctctggttggtgtccagcttgggggcagctgcctttcatttccattcttccagttgcacccagacccaggcaggtcatcggcgcccacaactccaagttgtataaatactccgtcgaccgtctcataacagtcataccgccgaaccaaatccaacgtccacagaaaagaaaacacattcccgtcgactcccctagtttcatcctattcatttctccccccaaacactccagctactagttactcgaggaatccatgtgcggcggcgcaatcatcttcgactacatcccggcgcggcgccgggtgtcgacagccgacttctggcctggttctgaagcagacgccgaggacattcatgcctcgcactccactgacccacagagaggtaagccctgcttccgtctttctctgctctccaggcgacaacacgccatccaggcagcaagctgcaaacggtcaatggtgtgacgccgtgctgccgactgttcccatgcagcgccgccgccgcgcgcgaaggcgaagcctgggcgccgcaagaaccagtaccgcgggatccggcagcggccgtggggcaagtgggcggcggagatccgcgaccccgtgaagggcgtccgcgtctggctcggcacctaccccaccgctgaggccgccgcgcgcgcgtacgaccgcgccgcgaggcgcatcaggggagccaaagccaaggtgaacttccccagcgacacctcctccagcgtcaccgtgccgacggcggtgtcgaggtctgctgctgctgctgctgcacaggccccggccgttctcccgctgcccaaggtggaggcacagactcaggtgtccgacgaggtcaaggagttgtccgaggagctgatggcctacgagaactacatgaacttcctcggcatcccttacatggagggagggactacagctgcaagtgccaccacagctgccgcctccgcggccgccggcgtcgccgaagaatcgcaggtcccggctccggccgggctgtggagcttcgaagattactactacccgccgtctctgtcgctctttactgaatgatgaacgtgctttgaccgtgcctgttttggtaacacctttgtgaacagatttcctgctcgtcgtagtcggtgtgatgtgatggcatcaatcgagctcctgtcctgtaattttgttgaacccatccattgtttcgtgactactgtgtgtccctgtaactcgcaagttgaggcatcaaagtttccagtttaactctgatctgtgctgctcagcagttctctgccgtaccgacgaatttgttttgttttgtacgtgattgaattggttttacgggtacaacgctgtaacacccggctttaaggaacaatgtcaggtgcatctcatacatgcgccaaaaagacaacatatataataacagagtgtatagagataaatgtcataaaacatcagagaatttattacatagcggaagacttattacaaaataacataataaagataaaacgaactaaggatcgtcggcgccaatgtcgactgggaaacgccacctagatcagatcgaactcctcagtgttaggcggctcctcctgaaccacctgatcatctcctgtggggggggggtgtgagacagcaagggtgagctcacacatgatcatcgctcaacaagttgtggggaataatgtgacacgaactcaccaaaggtgggagctcatgtgaagtgtaaggctgatcaatgataggggttaaagctgagcattgcttttaagtagttggtcaaaattttattagcagttactaagtgtaagtaaataccaaaccttaaataaagtaattgaacaaattaataataaacccatgcatatgcaaatgacaaaattgaatttaagttccataatttaaacatcagagagtcctgagctgctcatgaccgtgagctcggctagtataccagttttacactctgcagaggttgtaccctttacccacaagtcatgttacccatctgccaaggggtcatgaatcccattcacctctacctaggaagcgcggcagggcaacactacgaggcctttacaaagttccactagcttccgaaaacccgctacagtttatgggaagatccagtacagggttcctggctgaccgccatcgcagcaaaatcaaccagggacctccccgcactgacctctcccctactgcccttgcccctttcgggtaaggtagtcttccactagctttcctaattagtcagccaagg

SEQ ID NO: 606 - protein, 230 aa, Zea mays
MCGGAIIFDYIPARRRVSTADFWPGSEADAEDIHASHSTDPQRAPPPRAKAKPGRRKNQYRGIRQRPWGKWAAEIRDPVKGVRVWLGTYPTAEAAARAYDRAARRIRGAKAKVNFPSDTSSSVTVPTAVSRSAAAAAAQAPAVLPLPKVEAQTQVSDEVKELSEELMAYENYMNFLGIPYMEGGTTAASATTAAASAAAGVAEESQVPAPAGLWSFEDYYYPPSLSLFTE

SEQ ID NO: 607 - DNA, 3253 bp, Zea mays
caaaactaataaatgtcatatcacaaggaaagatatgaatattggattcgaacaattcacgtttatttaagtagtggaaacacattaaataataaataacaatgcttttatatataacgtaagatggagagtcaatagatagtagcgaatctcggcatcagtttccttctatcctgtgtgctcaagaatagtggcatggcctatgcgcatccataggtatatattatggatgtttgcatgcatgtattaattccttgacaccttatcagtatgccaagcacactatcaacaaattgctgggctgcaccaagatttgtcctcgcgtcgtactctaagtcaacgctagcgcgtctgcatgtagctatactatgtattattttattttatcacggtttagtttaaaaataaactaatcagacgataaatatttaaaaaaatgtcttaacatcatatgtcctgcaggagtgcatcctttgtgtacccaagttgaccagacagatgtgaacgtttacgcaattgctgccttaattctatcataaaattgtgttcttatgacaaagatatactcttgttggaagtatggccctgggatcaacccggctagtccaaccaaccggcctaaattgcactcctagctagtattgtcttgtgtcaaatggtctttttatattgtggaataggccctcttcagttaaaatggacattatatcactgtgaacgatatgtggtctcatttgtccttagccattgatatctcaatcttttcaatcgttgacctaagccattgaagcatgcctcactacaagtataaaattatagcatcaccaagatatggacacacatgactagatatatatatcattaatattatgattaaaataaattgtttgactaaatatatataagttaaataatgtagaataaattgaaactagaactaaaagatttgccacaaggcctataaataccgggccttgtccttgacatccactccacatccaaacactgtaacaacttgtgtagtacttaatccctcgcacctcatgaatcccaacttcaacagtgtgtggagcgctcccgagatcaatatgatgaactcactcatcactagtcacatcgccaacaacacctacacaaacaaccagcatgttgtggcaagtcgtagtgccattgtgaaccacaataactttgggatgccaacggaggtcgttccacccgtggacaacatggacatgatgcaaggctatctaatggatgatacggatgccatgaggcttgttcagggacaacaacatatgccaaatgttgttcctaatcaaaggaggcatgcagtgaagttttggactacagatgagcacaggtctttaattaatttttgcattattcatttggaatctttgtcacatatatacatcttcgttcagtgttattaattttcagtacatttaataagcatgtggtagtattcataatttcataccatgagatgctgagatttgattttcactgatcattagagtatatgatggtaggacatctatttttatctgattattatattaatcttgcttacgtactatatataggaatttccttcgtggtctagaagtgtttggccgtggtaaatggaagaacatctccaagtacttcgtccccacaaggacaccagtgcagatctctagccatgcacagaagtatttccgcaggcaggagtgcaccacagagaaacaacgctttagcatcaacgatgttggcctctacgacacacagccatgggtgcggcagaacaactcctctagcagctgggaggcgctcaccttcactgctggccgtgcgtacaataatacaaactactgtgcctttaacagcctcccgtatgccagcagccaggcaagtaacaaccaggtagctacatggattacagaccagcaggcaactgcaagttcttctatagctcctccagcgacggaggagagccagatatataaccgataatatatataatggtcatcagcagctgggagaggctttcttcatatataatcaataggtagatagatatggacaacgtccattgactagtttaatttctatctatatgttttgtatccaatgatgcatgtaaaacctagttggttgttaaaggtcattagtaccatactatatatgggctagaaacagtttcattgaaatttgcccctgagcaatacaatgaaattttaccaatgtgttatttatatattaatgtgtctacttgtatgtgttagttatatttcgcctgtcttcctcatatctatgtgaatatgttacaatgattgtatataattatgcattatctttttgtaaaaccttgcgtccaaaagtcttcttacgccccaagctctgcacatggaacgggtgcggtccgcatacacatagtacatcgatctatgtaaaatgctgacctagacatgatagcttggagtgacaaggatcataagctgattgtcaacatcagaaacttccaaggtggtacacgggtactaaacccacaccaactataaccattaatgggataaggtgttagaatccgagtattccatggtttatttggaacttagtgaaaactaggataaggatcttaacacatgcattgcatagaaaaaactcattagcaagaaaaataataaaatctactcgactagcatctaagtcaacacaactaattacaaagaaatttagagcctatttatacatctcatcacatgcatgcactagtagaaaacaactttatacctacggtgaggtctaatttttacacgattttggttatcaaatgccacagatattaaattagctatcccaactcaagaaccgccagtacacacaatatttcacgggcggttccgcaagtgcaaatcatgcatttctacatgcggccaatagaaatcatatttttattggtggtttcttaagaaaaatgtcagcacaaatccatgattttaacagttggttctcttaagaagccaccattagaaataatctctatcctaattttttttgagttttttatatgacctcgtacgaaaaaaccaccaaaataaaaattatagatctctaaaagttataaaattttgtagttgacaactttttattcgaaatcatttcgaccctcaaaaattgcatctgaatttgtcaaatttaaaatgtaatttttgaaaacggccttggatgaaaaagtaccaaaataacagtactataaacacagatattc

SEQ ID NO: 608 - protein, 241 aa, Zea mays
MNPNFNSVWSAPEINMMNSLITSHIANNTYTNNQHVVASRSAIVNHNNFGMPTEVVPPVDNMDMMQGYLMDDTDAMRLVQGQQHMPNVVPNQRRHAVKFWTTDEHRNFLRGLEVFGRGKWKNISKYFVPTRTPVQISSHAQKYFRRQECTTEKQRFSINDVGLYDTQPWVRQNNSSSSWEALTFTAGRAYNNTNYCAFNSLPYASSQASNNQVATWITDQQATASSSIAPPATEESQIYNR

SEQ ID NO: 609 - DNA, 2666 bp, Zea mays
ttctgtacaacaaaagtgagaggccattaagtttttgctagaaatgaataccacttgtcatttaacttgaaattgttatgatttaagtcatgatatggatattgatggatcttaatatactgatcgaacacaagaccacgtgaaagaaagagcgatgaaccattaattttttgctagaaaagagtaatggactaaataatgttgtatccaacatctgaagttgtgtatccatatagggtatgcattgaatataatccaccaggtgaggctaaaatctgtagctacttaatatagatggtcctctcataactttaggttttttctgtacaacaaaagtgagaggccattaagtttttgctagaaatgaataccacttgtcatttaacttgaaattgttgtgatttaagtcatgatatggatattgatggatcttaatatactgatcgaacacaagaccacgtgaaagaaaaatcgatgagccattaattttttgctagaaaagagtaatggactaaatcaatgttgtatccaacatctgaagttgtgtatccataattccatatagggtatgcattgaatataatccaccaggtgaggataaaatctatagctacttaatatagatggtcctctcataactttaggttttttctgcacaacaaaagtgagaagccattaagtttttgctagaaatgaataccacttgtcatttaacttgaaattgttgcgatttaagtcatgatatggatattgatggatcttaatgtactgatcaaacatgtacaagaccacgtgaaagaaaaagcgatgaaccattaattttttgctagaaaagagtaatggacaaaatcaatgttgtatccaacatctgaagttgcatattcatatagggcatgccacaatgttaggctacaatctatgactagctacttaattaataaagatggtcctcacataattttagggttctttctccataacaaaagtgagaagtcattaagttttttgatataaatgagtggtgactatcacacttgaataaggccacaacgctagtacaatctttataagtagtatccactagttattggcctcttactatacgtagcacactagcactcctccatagggccataaccatgccgtcctacaagaaactagtgatcgttggcttcgccttaaccttgctccttgtgtcattcggtatgtgtagctaactaacttgtagcaagcgttgcttccatctgcgaatgtgtatatgtctatatgtactagctagctagcgattgctaacagtacgtacgagaatttgttttgtggttccaggaatggatgcgtctgcaaaactgtgcagtacgacaatggatttactcatatgcggcggagcaatcccaggcgccgtgaaccaggcatgcgatgacacatgcagaaacaagggctacacaggtggcggcttttgcaacatgaaaatacaacgctgtgtttgtcgcaagccgtgtgcactggaggaacaaacagaggcgcgcgccggagacgaagcagccggcggcgctggagatatgatgagccggacgatggcagattgagtgatacgcatgacaaatgtttagacaccatatatataaggaataaaatcttcaatactataaagcactagttatgaccagtcgttctgcatcacgcatgaagcgtgtagatttatattcctctcttaacagcccctacaactataaaaacattcgacgtcctgcgacctgccgcacgcgtgaaccgcataggtctatgcccctctcttaacagtgggtcgttacgccatacatagaccataaaaccacccaaagatcctattagtaggctgttactctacagatgggttgtgagaaccacccaagtctaacatgatagcaagcggcacatagccgcaacattgccttatagtaccaccccactagataaaggtgaacgagcgaccaagcatgctataaaaaaagggtcgtgctcatttttcactcatatctttcctaatccttgcgtcctccccctaatcccccaccttgcctataaatagagcggcaaggggctcgctcatgccatcccaacctcagcccactcccacacaaccagaagcacaaggatcgttcgagcgttcattcgatcgttcattcgatcgtttgtccaaatatttttagtttgtttgttcgttcgtccaatcgttaatccgatcgttcatagttcgttcatctattcattcatccaaataaatattgttcaaccattatactgctgaaattccgaccgttcgtccgtccgttcatccaaataattattgttcagtcgttatgctgccgaaattccgacagttagttcctccgatcgttcgatcgtttgtccgttcgttcataatccctattcatcgttcgttcgtacgaactattcatcgttcatccttcgtgcatatgaactattcatcgttcgtccgttcgttcgtaatccctattcatcgtccggtcatacgaactattcaccattcatcattcgttcatacgactattcatcgtttattgttcgttcataatccctattcatcgttcgttcatacgaactattcatcattcatcgggtcgttcgtaatcactattcatcattactattcatcgttcatctga

SEQ ID NO: 610 - protein, 107 aa, Zea mays
MPSYKKLVIVGFALTLLLVSFGMDASAKLCSTTMDLLICGGAIPGAVNQACDDTCRNKGYTGGGFCNMKIQRCVCRKPCALEEQTEARAGDEAAGGAGDMMSRTMAD

SEQ ID NO: 611 - DNA, 5785 bp, Zea mays
gcaaatcataaaccatgcactctcctgtccctccaaggattgtttgacagaagggaattgaaacaactaatttttttactatttagttttaaatagtaagaagagtttagcctcttcaattcactactcttaaacatgtcctaagcgtcgttctaatttaatttttaaactttggctatatataagaaattattaatatttataatactatttttaacaaatttatttagagatctaaatatcgctaaatattttccagaatccaatcgcatttagaaatagggaaatttagatccataccattaaaagatcaccactttggatccataccattactatctcacttacatgtgggtccacatgagtcaatgacacgtggggtccatggtatatatctaaagtttggatcttttaatggtatagatccaattgttccttagaaatatttgattttttccggctaaagttcactccgtcattcagaggcacgtgcgtgtgagtctaatgggccggacgagccagggaccggagttaaaagatatggggcagtttggtcttctcctttgtttttagtgattttgtttttaaaattttatttgatacccatccgacggacatcaaattcagcagcaaacgaaaatcatttttttaatataaaattacaattaggctactgaataggggacgataaatattttttattttattattttgagcatgagactatgggaacagggccgttgccagttgggcaggttcagactcgctgcgccggagcccctgatcgtaattttccgtgggcgctagggcatattcgtaatgtggtcccatgggataaattcgattcccctcgaacggcaaatatctaccggagcgcgtctcggggaggagagagaaagtcagatccgtgttccgtgtccgcgtccagtgtgtccgctactccgctccccctcagtcctcagttcctcacctagcggtagcgtgcgcgcgggagacgtagatggcggcttcggaggcggcagcggcggcggcaacaccggtgacgccgacagaggggacggtgatcgcgatccacagcctggaggagtggagcatccagatcgaggaggccaacagcgccaagaagctggtttgtttctctgtccttgtattggcaacgtatctggtgctcaaagggtacggtgctcacgtgcgagaaatttggagagatcagtccatgcctacgctcatcttagaatctgccggatagatggtgtgttggtttgcctgtatggattgtattggtctgtgccgatttgtagaatttcgaaccgtttggtatgattgatattacctggtatataatatgttttcgtttgcactttggaatacttgtgggcttgacgctgagtgccttgagtctgtttttaatcaagtcgaattgggatttccggttagttggcatgatttgggaaatgggaagcgcccccttttgttggtgcgttagggaatttttataattattgaaagggtttatgtttatctcgagacttcagaattctgccggtaggtgaaatatgatcacaactgatatctaggagtttagcagcagatttgaaaaatgtaacatcctttgtggaatccagtcgtgataaaatgtgtgtagcgctgcattgaaggttggtcacagggggtgtttggttccacccaactaaagtttacctgtcaaatcaaatgtttgaatgataattatgggaatacagtattaaatatagtataattacaaaactaattacacatatgaagattaaaaggcgagacaaacttactaaacctaattatgtctatttttaatactcataattgatatttaaacatttgatgtgatacaaactaaacttgggaaccaaacaccccttcagtttcagcctagtgattcgttctttttaactaaaaatcatttgttttattgggaaacatgctcgtgcgttgcaatagaacccaatatatattagaacagattcggactctacagacgcgagttcttttttagcttgtatattcatgagtcctaatcatatatacgagatacataaggcgtgacccggtatgtcttggaatcggactccttatcaattgatacgagttgttttagccttaatgagtacatgtcacatacgagatatactaaatgcagtttgagaagtaaaaaaacaagacagttgaaactctccactgtccggtagctaggaggaggtggaaaagcaaggataaaaaatgttagttctttaacatcatgtgtggcgcagtggtgagaagcctttctagtttccactgagccaaaggtcctaggttcggtgcaatctctgtaaaagtggagacataagacatgtctcggttatttcttctctaaatcttacttctgtttaagccgctagcattagatctgttttatatattaaaaaggacaggaaacaaacgccttgatatttattatgctccaaattaatttagtctagagcttctctttaatttaattcggagcctcgcttctacgagcaacaatattgggcctcagagaggggtgcatgttagtagaataggttgtggagcgtattgtaacgacttcttctaagatttatttactgttctcgtcttacatttcaatttgtcttagatagaattgcattttgtaccatgattgcacgtgtgttgctccaactcatatggactgtaaaaaagctttatccaatgatcacattatgtgttccaatttatcttgtgaccgcacttcggcaaacaaaaacataaaagaaacactgcatgctatagttcaaatgggtatacaaatatgaaacataacccattagtcttcaactctttaccgtgtgtgcacataataaaatttataaaaatggcattcagcggttgatggctggcctatttgcgtgctgtactggtggttactccttaccctccatgtgcgtggggcacattgggagtgtttggcttctggctacattggcagtattttaatattttgttaaagtgcatccggacactcccattgactgctagtgctagcccttcacgttttgtccatagtcacaaagtttccgggtcgatagggtcgaggaacgggttcaaggaacgtggtacgctacttatgagaggtttttacacggtgggaacgaaaatgaccctgcgtacctgggtcggggacgacgtttccgggtcgagggtcgctaccactatacccgtttcttgtgactatggttttggcctttcggaattcggactatatatgtaaaggaaaaagggacagtacacagtaggtagcaacacatcatctctgtttcaaactcctcatacgttagtagagaggcagagttagacacgcaagattgtagcgacagacggaaaaatgtgtggaaagagattttactcctttaatattacatatagtgtaatgtagtatggttgatttgccggtggcatatctccttttgcaactgctgcagctttattatgtgtagtgtgcctatcctaagtcccaacacccttgggatcggaagtctttgttgggttgctctagaagttcagattggtatttttagagcaggcctaatcatagagccaaatgtttggccacaagtcaaattataagcctagctatgcaatagctgcttctttttatctacaaaagtttttttattattatgtgatactttttttaaccatttccacattctattccatattcattctcacatacacttgctatttaggccaactactacgtaggctcctgtgccagcttgttgcttgcatgagagccaagctctcctttctatcctcccttctcttctctacatcagcaaaaataccgattagtttggctataaaacaattattttacctgctctttaattttctaatgtgcagagaatacttttgttgtcacctattttgatgaatggatgctcctatggcatatcatcccctgtttttgtaatgccaaaatactgttccagttgaattgtctacactcgttaatattgagtgcaaaggggcatcactacgatttgtatgctaaaaccaagcatgttaactagaccgtaaacggtgatattgtttgagttggtgtgctgttgaggattttgttgtttttgtaattttgatgtgacaaaatcatcacgatttataatgcatgatcagataggcttatttttcaacgcatttcacatgtttctgctctacgcgagcttatatacttttcggtgtaataataggtggtgattgacttcactgcaacatggtgtcctccgtgccgcgccatggctccaatttttgctgatatggccaagaagtccccaaatgttgttttcctgaaagttgatgtggatgaaatgaaggtcgtcgaactttctaactctctttgcagattgtcatgatatattatacttgttaattgcattgtctgtgttctgatatctattttctgagcagaccattgctgagcaattcagcgtagaggccatgccaacattcctgttcatgagggagggcgacgtcaaggacagggtcgttggcgcagcaaaggaagagctagcaaggaagcttgaactacacatggcctcgtagatcagtgatgccgtaatgtagtattcgcctaaataagaggacgcctcgcctcaactctgagaaaactagtgcttctgtgatggtaattcgtatgagagagtgccccctttggtggtacttcttcgtatgtagtattaactcctgtcttaatatgttgccctgcttgtgcttttcataccatgtttgctctttcagctgaggtgttatacggtaaatcggagtcaatatctttgaaattgattaactgtagtcacctagcttttttccctaacagccagcttgtttagccgcgatgcgtgggttatttcggacagccatgtcttctcaggccagtatgctttctcttcctgaacactcaagtttccagaattacggtcttgtctggtattgagaaccgatatttgcatgttcatttccaaatcaatgttgaatgggacatttttttctcatctggtattctggtggcatttttgcaagaaatgctactgttaatttcaattccgttatttgtacccctataaaaaccacaacttcaaacattgctagagtcatccaaccaaatgtccatcacaatctacagttcttctaaatgaaccaaacaaactacgcttagattcatctcaaatcgatcatacttttgaaatcaagaaatgagatcagtttaaacttctcctttctcttatctaacgaccaatcttatttgaatcattctacctcatcattaatcatcaaccatgtatatctatatttatatcactataaatctttataaaacccaccacttcaaacattgctagagccacccaaccaaatatccatcacagtttacacctctactaaatgcaccaaataaactgcacctagattcatctcacctctcatttctcttactcaaatctaaaaatcaatcttaattggatcattcaacctcatcatcaatcatcaatcacaaaaaaacaaaaatgtcacgctatcgccgactcctcatctccccttcccattcaaatctggcaacggacgatggcgagggtggcgtcgatgtagacctccttgaccggctcaccctcgagggagcggcgcaccatccaggctaacaccaggcagaggatcaatgagaccacaacgatgtcagccatggtgagcagcacccacaatgagacga

SEQ ID NO: 612 - protein, 128 aa, Zea mays
MAASEAAAAAATPVAPTEGTVIAIHSLEEWSIQIEEANSAKKLVVIDFTATWCPPCRAMAPIFADMAKKSPNVVFLKVDVDEMKTIAEQFSVEAMPTFLFMREGDVKDRVVGAAKEELARKLELHMAS

SEQ ID NO: 613 - DNA, 4100 bp, Zea mays
actccagcaaattgttaaggtgggtttcagaagcgtttgacttccacatgaactccagcttctatagtacaattgatttgtgtgagtttccttgattaccctttatgattagtgggttgtcgcgagagaaaacgtaagttatatattgcgtaaccagtggcatggtgggtaatttttgtacaacttcatgaggagatataaaaacggtgtttttgtagcaccctctaagagtttcatgaatttcatgaaattgacctctagtttcgatttttttaaagctagagctcgtggagctggaccagtttaggtggaagaagttggaatgaagttgaaatttttgaagtgaagctctctcaaatagagcgttaatctacattattaatatttgacttctagataagcgagaatggcactctttagaatggagcaactgggcttagctacatttatgatatggaggttcttagttgtattatgtagtttcttagctaccttttatatttggaaaaccgaaccagactctggattgtacatagcctttgaagaattattcaagagttaattaagctgtaatgccactaatattaaggtttaatttacccttgtattcaatacttaacgttatatattctctataattaaacatagtccaacttaaaaaatgatttttgcaaagatagaattatatgttttttgtgagggctaatagtttaatgaagttatcgatgtttgtatatttcacgactataaccttcacctctgaccgctaatgcttgtttagaccatatttggatgttgttgtattaaaatattatgttattaaggaaccattgttttagcattgtattcaaaattatgaagtttttatatgcaaatgattcactcgaaaaaacaaaagtatcaaaatcatagtattttctctctctaaaattccaaaaatattttacatctaaagttgatgtcttggcctcccgcgctgttttaccttcctcctctggacaccaaccacaggccgacaaccgagtaagccggtcaattttggtatcctgctcatgactcatatcaggcggtagccgagcagccgcccagctttctcatgccagagcaaacccataggtccagtccaaatccaatccctgttgccatcagaatttcaggggcagccatggccgaaaaggagagcaacggagtgcgggtgtgcgtcaccggaggagccgggttcatcggctcctggctcgtcaggaagctcctcgagaaaggctacaccgtccacgccaccctgcggaacaccggtgcgtctgatggcggctcctcagctcgatccgcgcgtcgcgaaaggcgaaacacgccaaaggcgaaaggagtgggtcgggtctcgtgtgtggctgcctgatgattcgggaatcttagccggattcgtgtgctggtgggtgtgcaggggacgaggcgaaggcggggctgctgcgtcggctggtccccggcgcggcggagcggctgcggttgttccaggccgacctcttcgacgccgccaccttcgcgccggcgatcgctgggtgccagttcgtcttcctcgtcgccacgccattcgggctcgatagcgccggctcccaggtgaagcttgccgtcgcgttcgctcccttcactgttttactagtcaacgagtggtcaggcggcgacgcgccgtgctgtctcttcttaattttaagttgtggaaaattactgtccttgcaaaggaaaaatttgatcagactgagtatgagtaaagaccagtaagacagcacaaggattgcgagctgcgactgcgagcagaggaaacgtcttcacagttattcttgtctgccttgtttttctctatctgaagcaaaatcttgtggtgcccatcgaccgcgtatagcagtataagagcacggcggaagctgtggtggacgcggtgcgcgcgatcctccggcaatgcgaggagtcccggacggtgaagcgagtgatccacacagcctccgtagcggccgcctcgccgttgctggaggaggaggtctccgcctccggcgtcgggtacagagacttcatcgacgaatcttgttggacttcgctcaacgttgactatcctctccgaagcgcacacttcgacgtaagtagtatacaagcgaagcttcttctgatttctgaactggaacgcctgatcacattaatattttttagctgacggccatttgatttgcagaagtacatactgtcgaagctgcggtcagagcaggagctcctgagctacaacggcggcgagagcccggcgttcgaggtggtgaccctgccgctggggctcgtggcgggcgacacggtcctcggccgcgccccggagacggtggagagcgccgtggcgcccgtgtcccgcagcgagccctgcttcggcctcctgcgcatactgcagcagctcctggggtcgctgccgctggtgcacgtggacgacgtctgcgacgcgctcgtcttctgcatggagcggcgcccctccgtcgccggccgcttcctctgcgccgccgcgtacccgacgatccacgacgtggtcgcccactacgccagcaagttccctcacctcgacatcttgaaagagtaagatcaaaagcgtccacagcgacagcatcaccctgcacacaagaactgactgccgatttacgtttctgttgcgattggttggattgatctgcgtcaggacggaggcggtggcgacggtgcggcctgcccgggacaggttgggcgagctgggcttcaagtacaagtacggcatggaagagattctggatagcagcgttgcctgtgcggcgagattaggttcccttgacgcatccaagctcggcctacagaaaggataaaagctcgaagcttactcataagcaccatggggaacttggattgttcgctgtccactatacgcgttcgaaatttggaaactagacatactccaataaaacaagaggtaaagaaacgtgggctaactgatacgcgttgagcagttgagctagcctagtttagtccacctgtgtgcagggtttaaaacttcgacgaaattttatgacttgcgataattttaggcctctaaatatcaaccatacactctaaattgtatatgtgcatacacatatagccatatggacgctctgatctagcatcctacacctatgcacctctctaagaacaactccaacagcctcactaaatatatcagattcggtaaaaaaaaacccagttaaaattgtatccaatagtctcgttttattcttatcttctctatccaactcgtcatatggtccctttcgctagacatctttgccaaggcgtacggctcgccatatccctcgtcatgcccaactgtcctcccgccgtcgcagagaattcactctcccacgcgcccttctgctcccgcgtcgtccaccctgctactaggtcgcaccgtcggcaccgcgagtacgcctcgtcctcctgctactaggtcgcgccgtccgccccactactaggtcgcgccgtctaggtcacaccgtcggcaccgcgagtacgcctcgtcctcctgctactaggtcgcgccgtccgccccactactaggtcacgccgtcggcaccgcgagtacgccgcgccctcccgctctctctactaggttgcatcatccacccccttgacctccgcctcaccaccaagtgaagcacgcgccaccacattcgtccgttcgcgtgatggattcggaggcacatcgcacgcatagagatatggggcaattcactgtcagtttgatgctccggcgtgtgcttccttcaacaagctttgaaggcctgatgccagtggatcagcccgatggcaatcgaattgcccttgcttgagttgtgatgagcatttggaaatgctgctcagggacgttgaccatgaacacaaggaaaaatatgtttctttctttgcttattaatcagcagattctagggcgccatgtttatttctttatttagtcagctgggaactacaacccgggaaaataattagataagtcccacggtctgtatgtcacattcacttgcggcatgcctgttcatctgcgtgttcgggagattgcatactccgttccc

SEQ ID NO: 614 - protein, 357 aa, Zea mays
MAEKESNGVRVCVTGGAGFIGSWLVRKLLEKGYTVHATLRNTGDEAKAGLLRRLVPGAAERLRLFQADLFDAATFAPAIAGCQFVFLVATPFGLDSAGSQYKSTAEAVVDAVHAILRQCEESRTVKRVIHTASVAAASPLLEEEVPASGVGYRDFIDESCWTSLNVDYPLRSAHFDKYILSKLQSEQELLSYNNGESPAFEVVTLPLGLVAGDTVLGRAPETVESAVAPVSRSEPYFGLLRILQQLLGSLPLVHVDDVCDALVFCMERRPSVAGRFLCAAAYPTIHDVVAHYASKFPHLDILKETTEAVATVRPARDRLGELGFKYKYGMEEILDSSVACAARLGSLDGSKLGLQKG

SEQ ID NO: 615 - DNA, 3743 bp, Zea mays
gcaacaatcaaaagtaataatcgaaaaatacaacccaatatacaaaacaaacgaatcagtgagacaccatacattggtatacaaaattttccaactcgaatctagtttttttttaagaagattggaatggagagaaagttaagaaaaaaggtgggtgcaactctcggctagcagaacgactgatttatagaactacctaactcgcgacaagatctatgacaccgacctaggaagccaagtcagcgtcacggcagccctggccgccgacgccacgtcagagctcggcgcctaggccatatgacgccaagctaagagtacaaaattagaaataagtcaccgagtagtctaaatgttattttttgtcgaaaaaagaattaaaaaacaaaaaatcggatttaatcactgcaatccatctcgaacggaacacaagggacattttagctctatccactccgtcatgcgctattgggaaggcgaaaccgaagccgccattttcttgcgcaaccccgtgtagacgtaaacccgggctcgtgcgtgcttacacaccagatttgtatttgtattaatacggagtattacccaaaactagcagagctgaagaaggcacctagcgcgcgctcttcgtttcgtttgatcgcacgcgccaatcctgacgcggtcaaccgcgagtccgcgaggggaggggaggggaggcgaggagaatgacgcgcaccgtgacgaccacattggtgacactgtgttccgtcatcacgatactacaggcgccgcgcgcgtggctcctcgtatcccgaccgacggtcacgtcgcgcgggcgcgtcggtctcgcatcgcactccactttttccactcagttgcgtcacgattttcacgacgccccggcccccgcccgtcgatcccttccctcctcctgcttgggccgcgcccgcggttcgggttccccccttcggccgtccccctatatattaaaccatgcccgtcctgtggaaagcatccgttcggatccgagagtcctgcagagcccatcctgttcctgtccccctcgagcaatcgagctctacagctgcacgctcgcttacgcggagacacagacgctgagacacacgcaggtcatgatgctgctcatggactcggggagccgcggtgactgctccccggtctgcttggacctcagcgtcggcctttcgccgccgtcgccggggagcggcccggaaacgacagctgacgctgagagactcgaccgtcccgccactggctgctgggggccacggacatcgtccctcgctgacgggaaggacgaggtaactgaccgacgaccatttcctcgccgctcggtttccacaatctatcggcgtcgtcgtcgtccctgaaatcctgaaaatctatcggcatcggtggccacaatgctgtgtgatgacaggccaagaccctggaggccaggctcacccaggtcagcgaggagaaccggcgtctcaccgagatcatcgcctacatgtacgccagccaggtcgccgcgcggcggagtcccgacggcaggaagaggagcagggacagcctggagccgtcgaattcgggcgacgccaacgctgccgtcgagagcgccgccctcagcgacgagggcacgtgcaggcggatcaagctcaccagggtctgcaccaagatcgacccctccgacaccacgctcaccgtcaaagacggctaccagtggcgcaagtacggccagaaggtgacgcgcgacaacccgtccccgagagcctacttccgctgcgcatacgcaccatcctgccccgtcaagaagaaggtagactcctggcccaccatccgtccatccccggcctgacattgattcgattcacggcggcttctttcactctgtcgctaatggtcgatacaataactctgttcctcggaacaggtgcagaggagcgcggaggacagcgccatgctggtggccacgtacgagggcgagcacaaccacccgagcccgacgcgcgccggcgagctccccagctccacctccatcaactcctccggcccggccatcacgctggacctcaccaggaacggagccggcgccgtgcgggggctcgatgccgccgccgaggtgcccggcctcaagaggctgtgccaggagatcgcgtcaccggatttccgcacggcgctcgtggagcagatggcgcgctcgctcaccaaggatcccaagttcaccgacgcgctggctgccgcgatcctgcagcagctgccggagtactagtgtctagcgccccacctgctttcagtgcttattacagatatcagagcgcccgtcttcaaagagcagcagttctttcatcgtcaggaaacaaaaaaccgctttacgtttaggggtagctcgaaaactctatttttaagggatttttattatctcaaagaaaaataaataaatttttttaagaaaatagaaattcctttgaaaaatagagtttctaaactaagacttagggttagtttaggaatcacatttttccatgtgatttctatttttctaaagaaatttagtttatgttctttttagaaaacagaaatcccttagaaaaataaagcttctaaactagctcttacttagattagattagagccaatctccctcaaatttattataggtgtacctgtaagtttctttcttctgttcttctggctaggatctgaactgcactagtactactgtacatttcacatgtgcatagagccatagaaggccgttgtcaagtaccgcgactgcgtcctacctgaatgtgatctgcctagttatcaatagggaattttatactataaaatttaagtatagaatcagattagagagtgagtgaagaagcatttaaatcgtgatctattactatcccttttcaaagcatacatttgatctctctagaattagagatggagtgttgggtacaactaacacaactcgaccaatataacgggcgagctcgagccataatttttgacccgcaacaattcatagttgggtacagaccatgatttttgacccaaaacctgatccaactcgaaaaccttcgacccatagcttgaaaactcgtctcgacatgtcccacaggggggcacgtgccaacccggcggctatgcacgggtcaggtgtgggttgtgtcaaacgatccacgagccaaccattttttctcctcgaacatggttcgacaactatgcacaggtcaggcacgagctgtgtcaaacgacccgaccgatcatgacccggcccaaacccgatccgagcagaggtttgaacaggtctagatacagcccaagtaaagttttatacttgtctcgtcaaatgtttgaataataattccggatattaaatatagtctaattataagactagttatagatggagactaaaagacaagtcaattttattaaatttaattaaaccaatacttaatagtcttaattgatatttgttttaattaatattcaaacatttaatgtagcacagactaaactttagtaaccaaatatcccttaaatttagaaactaaactctctcgatggaggatttcatttcactgtttctaaaacaagctgcaccaccagttaatgtatacatacatgttttgatccaatgtaaattacgtagccatttgaaatcatatctaaactgaacacagtcacttcaacaaatacaatatatctcatgccgacaaataaacatgatcaaccaaaaaatattgattaatataatattcatc

SEQ ID NO: 616 - protein, 302 aa, Zea mays
MMLLMDSGSRGDCSPVCLDLSVGLSPPSPGSGPETTADAERLDRPATGCWGPRTSSLADGKDEAKTLEARLTQVSEENRRLTEIIAYMYASQVAARRSPDGRKRSRDSLEPSNSGDANAAVESAALSDEGTCRRIKLTRVCTKIDPSDTTLTVKDGYQWRKYGQKVTRDNPSPRAYFRCAYAPSCPVKKKVQRSAEDSAMLVATYEGEHNHPSPTRAGELPSSTSINSSGPAITLDLTRNGAGAVRGLDAAAEVPGLKRLCQEIASPDFRTALVEQMARSLTKDPKFTDALAAAILQQLPEY

SEQ ID NO: 617 - DNA, 2704 bp, Zea mays
tttttcataaaataggctaaaatacaaaaaaaatcaggaggttcgctgtgctgcgaacagaggtgcgagcgaatataataggatgtttgtgtagtaataagctagtgtattatcttcttaatccttacttttttatttggtttgtgaaatagaatgagggcacgtttggtttgatggactaaagattagtccctccattttagtctcatttaatccttaaattgccaaacggtgggactaaaacagagacgactaaactgttttagtctctagtccctaaagggatgactaaaagggactaaactatataaattccacttttttacccctcttttatttcagttgcactaatggtatgagaatgccaaagggtatttcagtcctcttatgattcatttaatatgttttgaatacttttagtccctataaccaaacaaggtagagactaaactttagactcttaattaaattttagttcatggactaaaggaaccaaacaagccctgagtcgatccataaccatctcatctcattccttatagttagttagtttgttagttaacactaatataagaaatgcggtcacctactaaagctgagcaatagactcatgatgcacaacatcgctgaatgtcgtcagttcaaactttacacgttcgtaacagaaatacagataagaatgcatcttatccgtttgacttcaactgcattttagactagacagcatgcacgaattgaccattccatgaggtcctttgatctgtacaatatataaatgcacctaacagaatcaaagttgcctcaacgctatgcatgtcctgttcgtggaattctattgaactcatacgtagaaaagattggcatgccggccatattttcgtgcaacgggactatttttccaagcatactggagaaaattcacatgctctccactattaatagcccccacatatttgcagtatagcatccacaaattaaactcacgcacacacacaattaggtcacatacacacatcccggctgcctccctaggtagcagcttctacaatggaggcatccaacaagctcgcagtcttgctcctgtggctggtcatggcagctaccactgccgtgcacccttcctactccgagaactcgcctcaagactacctcactccccaaaacagcgcccgtgccgccgtcggtgttggcccggtgatctggagcacgaagctgcagcagttcgcggagaagtacgccgcacagagggccagcgactgccgtctccagcactcgggcgggccctacggggagaacatcttctgggggtccgccggcttcgattggaaggcggcggacgcggtgcgatcgtgggtagacgagaaacagtggtacaaatacgccaccaacagctgcgccgccggcaaggtgtgtggccactacacgcaggtggtgtggcgcgccactacaagcatcggctgcgcgcgcgtcgtgtgccgcgacaaccgtggcgtctttatcatctgcaactacgagccccgcggcaacatcgccgggatgaagccctactgatatattgtgcctgcgatcaatggcaactgatatattatatctagacacgagcttgttgcagcgcatgactttccacgtgatatatgaataagattttataactagataaatctttgagtgtagtcataaataaatcaaagaggtttgttatttacaagttgctaggatccttctatcgtatgtgcaacttcgtcaaacttcacggctcgtgaaaaccgaatgtttgacatatgtgaactagtagggtgtttggtttgagaaataagttagttcattatcttctcactcctcactatttttgtttggtttgtggaatagaatgagttgattcatcaacacctcatttcttaaagttagttagtactaacatgatgaatgggaccatctcactaaatttaaggaatgaacttataattcaacacctcatctagaatagagtgattcctcaaaccaaacacctcctatttgcagagcgtcgccactgcacgggcgtgacagatgggaggtgtaagtcttttgttatatatctaagtcttaaaaactacaaacaaaacattgttgaagaataggcgatcggtatcagttgagaaacaaatataatattggatttccaaatcgtattggataatgagggcttaaccagtcaatctttagtcccgactgcatacaccaggattaaagatggcctttgatatttgttggtcatttcattttgaactctaaaagatatcaaatgacaaggcaacacaagttaaaacataaaagcttctccacctaattaactcttctacgatggttaatcagttggagaaggcaataggatatttcaacaaaggtaatcaaatcatcatgtaaataaagaggactaaaacttatctcttatatggacgtgtatattcacatttatttcatttcttgataagtacttaacaattacaaatataccttgggctttacacgagatatactcctaaaggtaccttcgaaggctgagcagccagatgcttggggtttgaaaaacgtaatttatgcatggtattgttcctctatttatagtcgaaagggtacagctctggtgaatttacaatcgtgaccttaggcctatacatttactctattttacatgccaagggcgaggttttgctttttcttc

SEQ ID NO: 618 - protein, 167 aa, Zea mays
MEASNKLAVLLLWLVMAATTAVHPSYSENSPQDYLTPQNSARAAVGVGPVIWSTKLQQFAEKYAAQRASDCRLQHSGGPYGENIFWGSAGFDWKAADAVRSWVDEKQWYKYATNSCAAGKVCGHYTQVVWRATTSIGCARVVCRDNRGVFIICNYEPRGNIAGMKPY

SEQ ID NO: 619 - DNA, 3752 bp, Zea mays
acaagccctaaaggttgtgcactaaaatccttaggttaataaaagctaacgaaagttgatagtaagatcgataggtaatttggtatggctagttataaatatagacgttgaaactcgccttagtggagtgagtgggtgcatgtataagtgtacaatagtttgtactttgtaggcgttcgcaccgtaaggccaactccaacaatgccccccactcccctaccccatgtaaggtgtggtttggagtaaaaactctctccaacaatcccacaacccactccatatggggagagagattgtgctccccatatatgaagggcctctaatcttctcacacactttaattaccttatctttttatattgatcctttttaagtatggtgtcttgataacaatgtgtattatgacaatataaatagtctatgtttttaacttcaaaactgatgaaaaaatgttaaataactttagttatagaatatagggggtctgaatatgataaatggttggagatgttctagatatgaaggagtatattttaaaatgatgtagtaaaatataatagaaagtataaatagaggaagaaatgtggaggtaatgaatggttggagatagtccagagagagtgagatcggcaaggtggtagctgggacgagcggctgcaaacaactgtagcaaaaactaaaaatggctacttctgcagcaggttttgtgaaaccaaagcccgcgaagaaaaatataaataggtacgaaattccagatcgcgggtaggtaggaggagcagctagattgttagatgaagcacgcaagtggcagctgtatatattgatgaaccactacaccctcgccaccagtcaaacaacgccaagcgcgcctcccgtgaacccagcggcccgtcaagtcaaagcatggacgtgccgctcccgctgctgctcggctccgtggccgtttccctcgtcgtgtggtgccttctgctccgccgcggcggggccgggaaggggaagcggccgctgccgcccggtccccggggctggccggtgctgggcaacctgccgcaggtcggcgccaagccgcaccacaccatgtgtgctatggcgcgggagtacggcccgctgttccggctccggttcggcagcgccgaggtggtggtggccgcgtcggcgcgggtggcggcccagttcctgcgcgcccacgacgccaacttcagcaaccgcccgcccaactccggggccgagcacgtggcgtacaactaccaggacctggtgttcgccccgtacggctcccggtggcgcgcgctacggaagctgtgcgcgctccacctcttctccgccaaggccctggacgacctgcgcggcgtcagagagggcgaggtagcgctcatggtgagggagctcgcccggcagggagagcgaggacgggccgccgtggcgctgggccaggtggccaacgtctgcgcgaccaacacgctggcccgggcgaccgtgggccggcgcgtgttcgccgtcgacggaggggagggcgccagggagttcaaggagatggtggtggagctgatgcagctcgccggggtcttcaacgtcggggacttcgtgccggcgctcgcgtggctcgacccgcagggcgtggtcggcaggatgaagcggctgcaccgcaggtacgacgacatgatgaacgggatcatcagggagaggaaggccgccgaggaaggcaaggacctgctcagcgtgctgctggccaggatgcgggagcagcagccgctagcggagggcgacgacactaggttcaacgagactgacatcaaggcacttctcctggtaagcttacctttcccgtacgagcgcaacgactgccggcagtgacggggacatgctttgtactgtacctttattgcaaattgcaattgaccccgtcccgtcgtgctggggagttggagttttgggtcttgttttctcacatggacggaaatactttctgtggccatatcgtgacaacagaacctcttcacggctgggacggacacgacatccagcacggtggagtgggcgctggccgagctgatccggcatccggacgtgctcaggaaggcccagcaggagctcgacgccgtcgtcggccgcgaccgcctcgtctccgagtcggacctcccgcgcctcacgtacctcacggcggtgatcaaggagacgttccgtctgcacccgtccacgccgctgtcgctgccccgcgtcgccgccgaggagtgcgaggtggacgggttccgcatccccgccggcaccacgctgctggtgaacgtgtgggcgatcgcccgagacccggaggcgtggcccgagcctctcgagttccggcccgcccgcttcctcccgggcggctcgcacgcgggagtcgatgtcaaagggagcgacttcgagctcatcccgttcggcgccggccggagaatctgcgcgggcctcagctggggtctgcggatggtcacgctcatgacggccacgctggtgcacgccctggactgggacctcgccgacggcatgaccgcggacaagctggacatggaggaggcctacgggctcaccctgcagcgcgccgtgccgttaatggtccgcccagcacccagactgctgccgtctgcttacgcagagtagaaatcgatgctcgccggccatccatgccgtccgtatgcatggatgcatggtcaaataaataagcgttgtacgtgggtatcagtgtcacaaactcacaatgtgtatcatgtattgcttcgtcagtggcgtgtgtaagcgtccgatttttttttgtattttattctttttccagaaaaaaatcgccgttgaaatcgcataacaaaactaccgtttcttattttctttaccaaactataaccgttttaaaattttaagcttggtatcatagcctatagtgtcaagcaccagtataaaaatagctctaagcctttggtggaatctactttttataactgattcggtatagcgtgccagtgataataaactgaaactactagggaaaaccatccatttccatcggcggttgatgtaagggaaccaccggtgataatctcattttcactagcggttccattacaacaaccgtcattagaaataaattgacgctaatgttaagaaatccgtcattgaaaattgatggtttgcactagcggttgcttactccaaccgtctgtgacctttgttgtataaaacccccattttcctctcggaccagtactgtttctcgcagtcaccttccattgaaggcaattttagaggtccagatttcacaaaatacaagggtagattttgatctttatttttggaagaaggctgctaagaaaggatggtttatgtttttcttgccaatttttgttcattcttgctcaattttagccacatcttggatctagggttcaccatgtgtgtgagagaagagtatagctaggtttttttctctatttcctcaaatgaggttgcttaagatggttagattttgtctctcctcttttcctttccacgttttgttctcaaatcagtttatccatgatatatttagttgttcaatgaatggtgcatgtgtttgtatggagagagaggaagataggtttggtaattaagattttttattagctactagaaagttagattttatgtttctcttgctaatttttgttcattcttcctcaattttagcaacattttagatctagggtttcaccatgagttagagagaagagtagctaggtttttgtctctat

SEQ ID NO: 620 - protein, 457 aa, Zea mays
MCAMAREYGPLFRLRFGSAEVVVAASARVAAQFLRAHDANFSNRPPNSGAEHVAYNYQDLVFAPYGSRWRALRKLCALHLFSAKALDDLRGVREGEVALMVRELARQGERGRAAVALGQVANVCATNTLARATVGRRVFAVDGGEGAREFKEMVVELMQLAGVFNVGDFVPALAWLDPQGVVGRMKRLHRRYDDMMNGIIRERKAAEEGKDLLSVLLARMREQQPLAEGDDTRFNETDIKALLLNLFTAGTDTTSSTVEWALAELIRHPDVLRKAQQELDAVVGRDRLVSESDLPRLTYLTAVIKETFRLHPSTPLSLPRVAAEECEVDGFRIPAGTTLLVNVWAIARDPEAWPEPLEFRPARFLPGGSHAGVDVKGSDFELIPFGAGRRICAGLSWGLRMVTLMTATLVHALDWDLADGMTADKLDMEEAYGLTLQRAVPLMVRPAPRLLPSAYAE

SEQ ID NO: 621 - DNA, 6349 bp, Zea mays
  misc_feature (1)..(1000): n is a, c, g, or t
nnnnnnnnnnnnnnnnnnnnnnnnnnnnnnnnnnnnnnnnnnnnnnnnnnnnnnnnnnnnnnnnnnnnnnnnnnnnnnnnnnnnnnnnnnnnnnnnnnnnnnnnnnnnnnnnnnnnnnnnnnnnnnnnnnnnnnnnnnnnnnnnnnnnnnnnnnnnnnnnnnnnnnnnnnnnnnnnnnnnnnnnnnnnnnnnnnnnnnnnnnnnnnnnnnnnnnnnnnnnnnnnnnnnnnnnnnnnnnnnnnnnnnnnnnnnnnnnnnnnnnnnnnnnnnnnnnnnnnnnnnnnnnnnnnnnnnnnnnnnnnnnnnnnnnnnnnnnnnnnnnnnnnnnnnnnnnnnnnnnnnnnnnnnnnnnnnnnnnnnnnnnnnnnnnnnnnnnnnnnnnnnnnnnnnnnnnnnnnnnnnnnnnnnnnnnnnnnnnnnnnnnnnnnnnnnnnnnnnnnnnnnnnnnnnnnnnnnnnnnnnnnnnnnnnnnnnnnnnnnnnnnnnnnnnnnnnnnnnnnnnnnnnnnnnnnnnnnnnnnnnnnnnnnnnnnnnnnnnnnnnnnnnnnnnnnnnnnnnnnnnnnnnnnnnnnnnnnnnnnnnnnnnnnnnnnnnnnnnnnnnnnnnnnnnnnnnnnnnnnnnnnnnnnnnnnnnnnnnnnnnnnnnnnnnnnnnnnnnnnnnnnnnnnnnnnnnnnnnnnnnnnnnnnnnnnnnnnnnnnnnnnnnnnnnnnnnnnnnnnnnnnnnnnnnnnnnnnnnnnnnnnnnnnnnnnnnnnnnnnnnnnnnnnnnnnnnnnnnnnnnnnnnnnnnnnnnnnnnnnnnnnnnnnnnnnnnnnnnnnnnnnnnnnnnnnnnnnnnnnnnnnnnnnnnnnnnnnnnnnnnnnnnnnnnnnnnnnnnnnnnnnnnnnnnnnnnnnnnnnnnnnnnnnnnnnnnnnnnnnnnnnnnnnnnnnnnnnnnnnnnnnnnnnnnnnnnnnnnnnnnnnnnnnnnnnnnnnnnnnnnnnnnnnnnnnnnnnnnnnagagcccccacaggggcatactggaggcatggctccggcgtctcaaagaagcctactatgatgccgaggacttgttggacgagcatgagtacaatgtccttgagggcaaggccaagagcgaaaaaagtctcctgctgggagagcatggaagctcctccactgcaactactgtcatgaagccttttcatgctgctatgagcagggcacggaacttgctccctcaaaacagaaggctaattagcaagatgaacgagctcaaagcaatcctgacagaagcccaacaacttcgagatcttcttggtttgccacatggcaataccgtcgagtggccagctgcagcacctaccagtgttcccacaaccacatcacttcccacttccaaggtttttggtcgcgacagggatcgtgatcgtatagtagattttcttctcggcaagacaacaactgctgaggcaagctcagctaagtactcgggtttggccattgttggattgggaggaatggggaagtccaccttagcacagtatgtctataatgacaaaaggatagaagaatgctttgatatcaggatgtgggtgtgcatctcacgcaaacttgatgtgcatcgtcacacaagggagattatagagtctgcaaaaaagggagagtgcccacgtgttgataatctcgatactctccagtgcaaattacgtgatatactacaagagtcacagaaattcctgcttgtcttggatgatgtttggtttgaaaaatctcataatgagacagagtgggagttattccttgctccattagtctctaaacagtcagggagcaaagttttggtgacttctcgaagtaaaacacttcctgccgctatttgttgtgaacaagaacatgtcattcatttgaaaaacatggatgatactgagtttttggctctttttaaacaccatgctttctctggagcagaaatcaaagaccaagtattacgcacgaagctggaagacactgcagtggagattgctaaaaggcttggacaatgtcctttggcagcaaaagttctgggttctcgattgtgcaggaaaaaggatattgctgaatggaaagctgctctaaagattggagatttaagtgatcccttcacatctctgttgtggagttacgagaagttagatccacgtctgcagaggtgcttcttgtattgcagcttgtttccaaaaggtcatagatatgaatctaatgagttggttcacctttgggtggcagaaggatttgttggttcatgcaatttgagtaggagaacgttagaagaggttgggatggattacttcaatgatatggtctctgtatctttcttccaattggtttttcatatctattgtgattcgtactatgtcatgcatgatatccttcatgattttgcagagtcactctctagagaagactgctttagattagaagatgataatgtgacagaaataccatgcactgttcgacatctatctattcatgttcatagtatgcaaaagcataagcaaattatctgcaagctacatcatttacgcactattatctgcatcgatccgctaatggatggcccaagtgatatttttgatggcatgctacggaaccaaagaaaactgcgtgtattgtctctgtcattttacaacagcaaaaatttgccagaatctattggtgagctgaagcacctccggtatttgaacctcatcaggacgttagtttctgaattgcctagatcattatgtactctctaccacttacaattactttggttaaaccacatggtggagaatttgcctgacaaactatgcaatttaagaaagctacgacatctaggagcgtactcatcgtacactcatgatttcgtgaatgaaaagcctatttgccaaattctgaatataggtaagttaacgtcgctacaacacatttatgtcttttctgtacagaagaagcaaggttatgagttgcgacagttgaaggacttgaatgagcttggtggcagtttaagagtgaaaaatcttgagaatgtcattggaaaggatgaagccgtagagtcgaagctatatctgaaaagtcgccttaaagagttggcacttgagtggagttccaataatagaatggatgcaatggatattctagaaggtctgagaccgccaccccaactgagtaagctcacaatcgaaggttacagatctgatacatatcctgggtggttactagagcgatcctattttgagaatttggaaagttttgaacttagtaattgcagtttgctagaaggcctaccaccagatacagagctccttcggaattgctctatgttgtgtataaactttgttccaaatttgaaggaactatctaatcttccagcaagccttgcatatttatcaattgataggtgcccactgcttatgtttatcaccaacaatgagctaggacagcatgactttagggaaaatataataatgaaggcagccgacctggcatctaaacttgcattgatgtgggaggtggattcaggaaaagaatttattaggagtgtactgtcgaaagactattcatctctgaagcagttgatgacattgatgatggatgatgatatatcaaagcatcttcaaattattgaaagtggtctggaggaaagagaagataaagtatggatgaaagaaaacatcatcaaggcatggctcttttgccatgagcagaggataagattcatttacggaaggaccatggagatgccattggttctaccgtcaggactccgtagactttccctttcttcatgcagtattacagatgaagctttagctatttgccttggtggcctcacttcaccgataactgtagaattggaatataatatggcattaactacacttccatctgaagaggtgtttgagcatttgacaaagcttgacagtttgattgtaagaggttgttggtgtctcaaatcactggggggcttacgtgctgctccatctctttcctatcttaactgtttggattgtccttctttagagctagcacgtggagcagaactaatgccattgaaccttgctcgcaatctcagcatccgtggctgcattcttgcagttgattcattcattaatggcttgccacacctgaaacatctttccattgatgtctgcagaagctccccatccttatcgattggccacctgacctcccttcaatcattacatctaaatggtctccctgatctttactttgttgaaggcttgtcttccctgcaccttaagcgcctaagtttagtagatgttgcaaacctcactgccaagtgcatctcacagtttcgtgtccaggaatcgctcacggttagtagctctgtattgctcaaccacatgctaatggctgaagggtttacagccccaccaaatcttactcttttagattgcaaggagccgtcagtttcatttgaagaacctgcaaatctctcatccgtcaagcacctgaagttttcatgttgcgaaacagagtccctgcctagaaatctaaaatccgtctcaagtctggagagtctttctatagaacattgccccaacatagcatctttaccagatctgccgtcctccctccagcgcataactatattgaattgccccgtcttgatgaagaattgccaagaacctgatggagaaagctggccaaagatttcgcacgttcgttggaagagctttctaccaataccgaactggcttccttagagttgccactttgaaataaatgagaaggtacaggttctactaattcattttttccagcacaattgatgagtttctcaatatttaaaacatttcatgttctaaacaggcaccttgacgtcacccctcttctcttgaagctccagagttcaggctcaagtcagaagccaatccgtcgttaattctgccgtccccgcggttccctgtttttgccgcttgtattgctccgctatttcagttgctatatcattcattccttggttgtgcacaattgccaatatgtatttctctgacagaatgaagtgataactgtggctagggcttttgttttcatgtgcacaattgctatatcattcatgtggcaattagtataaatactccaggcaatgcaatagagaagatagttcattttcctgcacttgtgcttgtggatggtgtagcagagaagttcaccatggaaccagttccagtaatgtgtgtgctacagtcaaaataggtcttaattctctgctacatacagtcaaaacgtgtctgctacagtccgagtgtttctggagattcgttgttggcggatgatgagctacatttgtacagtatggattgagctcgaggacttgttcatctccttgctctattaccagttaaaaggtgattgcttgttctctattaccaattggattgattacaagtgtgcttgctggcgtaagagatgaaaatgccttgtattttagtgcatcaaaactgaaggtttttggtggtatgctccattctgttcaatgtcctaaaccctacacacaaaatgtaaaaccttaggcgctggtttgcagcatctataaccaaagcgtatcattcattgattgcacggcgcttctgcagcacctatctgttgttgctgctgatcaaccgctgtgatgttcaacaacttgtccgggcgggcgtcaaagctattctcactgagcaggctaccataaacatcgacatccatctgttgttgcaatgctgattcaaaagaggattgaaggagattaaatcacttcctattcaattttaactaagagataatttaattctctctaatccctttttggattgccctaaccgaacaagtccttgttattgggtttaatagcggattgacatattatatgcgaacaactcagaattacacttctactactagatattatctctccaatgcaaatatcaatattacttaactgaatttaatacctctcttctctcattgtgtcttagatatcgtattgaaatcaaatcttacgtaagatccaatttcttactatttcttcatttaattatttatcacttttatcctatgtggcagctgaattaatgctataaaaactggatgatgatgtggatgattgagaccgctctcagatacaattagcaaaatctaaagaattccaaaccaataattcaagattacccacctagcgacattaattagggagacgcgcatgcgcatgcttgcaggaaatctcttggtttcggctcaagtatagtatttcaaagttctacaggatctatctgttgctcctgttgttcaacaactacgtgtccgcacacgcgtcaaatacggatggcaaattcctctttgttg

SEQ ID NO: 622 - protein, 1298 aa, Zea mays
MADFALAGLRWAASPIVNELLTKASAYLSLDMVREIQRLEATVLPQFELVIQAAQKSPHRGILEAWLRRLKEAYYDAEDLLDEHEYNVLEGKAKSEKSLLLGEHGSSSTATTVMKPFHAAMSRARNLLPQNRRLISKMNELKAILTEAQQLRDLLGLPHGNTVEWPAAAPTSVPTTTSLPTSKVFGRDRDRDRIVDFLLGKTTTAEASSAKYSGLAIVGLGGMGKSTLAQYVYNDKRIEECFDIRMWVCISRKLDVHRHTREIIESAKKGECPRVDNLDTLQCKLRDILQESQKFLLVLDDVWFEKSHNETEWELFLAPLVSKQSGSKVLVTSRSKTLPAAICCEQEHVIHLKNMDDTEFLALFKHHAFSGAEIKDQVLRTKLEDTAVEIAKRLGQCPLAAKVLGSRLCRKKDIAEWKAALKIGDLSDPFTSLLWSYEKLDPRLQRCFLYCSLFPKGHRYESNELVHLWVAEGFVGSCNLSRRTLEEVGMDYFNDMVSVSFFQLVFHIYCDSYYVMHDILHDFAESLSREDCFRLEDDNVTEIPCTVRHLSIHVHSMQKHKQIICKLHHLRTIICIDPLMDGPSDIFDGMLRNQRKLRVLSLSFYNSKNLPESIGELKHLRYLNLIRTLVSELPRSLCTLYHLQLLWLNHMVENLPDKLCNLRKLRHLGAYSSYTHDFVNEKPICQILNIGKLTSLQHIYVFSVQKKQGYELRQLKDLNELGGSLRVKNLENVIGKDEAVESKLYLKSRLKELALEWSSNNRMDAMDILEGLRPPPQLSKLTIEGYRSDTYPGWLLERSYFENLESFELSNCSLLEGLPPDTELLRNCSMLCINFVPNLKELSNLPASLAYLSIDRCPLLMFITNNELGQHDFRENIIMKAADLASKLALMWEVDSGKEFIRSVLSKDYSSLKQLMTLMMDDDISKHLQIIESGLEEREDKVWMKENIIKAWLFCHEQRIRFIYGRTMEMPLVLPSGLRRLSLSSCSITDEALAICLGGLTSPITVELEYNMALTTLPSEEVFEHLTKLDSLIVRGCWCLKSLGGLRAAPSLSYLNCLDCPSLELARGAELMPLNLARNLSIRGCILAVDSFINGLPHLKHLSIDVCRSSPSLSIGHLTSLQSLHLNGLPDLYFVEGLSSLHLKRLSLVDVANLTAKCISQFRVQESLTVSSSVLLNHMLMAEGFTAPPNLTLLDCKEPSVSFEEPANLSSVKHLKFSCCETESLPRNLKSVSSLESLSIEHCPNIASLPDLPSSLQRITILNCPVLMKNCQEPDGESWPKISHVRWKSFLPIPNWLP

SEQ ID NO: 623 - DNA, 3037 bp, Zea mays
gccttgggctggaatctggaattctggatcgctggaagagtggaagacaagaattaaaaggcccagaaccgaatagcctaaacggtacaaaaacgggattttcccgaatcaaaacggtaaccgcaaaaacgaacgaaaaaacagtctgctcgttttcgataccgttaccgaagacagtctacccgttttcgtcccgaaaccgaaaaataaccgaagtatacgaaaacgatccaaaaaaaccgataatcggaacggggcggtacgggatttttccgtaccgttttcatccctaactgcagtgcagccagatgaaaacctacacatgggacgtgcagtgatctgcgatagcatgaaactcacgcagagcttgcaggccagctaataatgtattaatgccttgactggtcatgggaacggagaaaaggtagctgctttattagctcttgtctaggagtggatgagcgtgccgattagatcaagaagacgagacgttgatgttgaccgaaacctcacgtactcctacgctgtagtactaggaattaaacactggtaggtgaggctgtttcaattcaatgccctcgcagtcgcagctggttaatgcctctgcccgccggcgtctggagtctgccatggctctgggcaacccactaccagggttggccatttacaggattaccctttactgctgtctgcatccctgttgactgtttacgcgttctcttggccacattgctcgcgtagccatatatacacgtttattatatatctatatatattatgtacggtgtccatagtatactactgctgggtgctggccaatgtagacaacatgtagtggctgactgacaactacttgactgctacaggaatccaagcgctcagactcactcttactggagaccactatatggtttacctgtggcacatgcaaactctccaggggcattctcgggcaatgctttgtggccccacatgtcccagcttcatattcggtgctcgacgccgtgtgactctgccagagtgccacctgccacggacacggagggagggaggtgtgccatcagcgcgcagcatcctccagccgatagcctctcactgcctcacttcagcctcggacctgaacagacctcaggaaaggggagacctggaacgaccgtcgagctagagcggctgcgcgctgcgccgagagctggggagtggggactggggaccgaattgaaggcaagaaagtagaaacgaaccaccacaggcggcgcggcaatggatgagcgcggggagaaggaggaggagcacggagtagtggaggaggagacggcggcggttgtgctcaaggaggtggaggtggagatggagatggtcggcggctctgaagaagcctcggcggcgccgctcctcctcgcgcacccgtgctcgctgctgcagctcctgctccgcgcctgcgccggctgcctggtgcgcctgctgcacggccactgcagcgacggcgccaacgacgacccaaaagctgctgccgacgacgacgacgctgcgcctgaagctgctgctgctgcggcggcggcggcgggcgatggcggcgacaaggcagccaccgtaagtgtcgttcgagaccaccgcttgatatatttgtcggtcgtacacgtaacgtacgtacggtaaccggtcggatcgatcatcgtgtaaacatgcatgcaaacctttgcagtacttgtacatgcaggaggtgtgggcagtgaggaggaggccgacgacgcccggccgtccgagagaaggttccggtggcaatggagggaaccaccactagctagctagctctctagcgcgacgccgctgcaacgtacgtacggtgaccctagcttgttcgcttgcgcgtgatcagagtgcgtagcttcttgtaagttgtaacttacttggtactcgtactagatttcgaaagtaacgtcgttaattagtaagtagtactagtacgtgagtgtggtttatgttatatgttctgtagcttcaatgcaaagaagactgtgtgcatgtgtttgaggattattgtttcgactttcgccgaatgattccaggtagatgcggtagtatgtgattcacacgtcttatttcttggcagcgatccgaatgaaatcaccttggggccgggggcaggtcgggtgtttttattgaaacgaaaaggacgacgggaggcgaaaataaagcatacccgatcgagagggcagaaacgacagcgccaaccttgcactgcactggcgtcttggcagttggcacaacccatgcatgaccgaaactacttctgatgaaccacacgcgcgcgtgcacagctgcgcaggacgtacgcgacgacgaccaccaagtacgacgtgtgccccggcctggctatatgtcgtcgttgttagaaagttaggcatttttagttttaatttaatccagataatcagtgcgatatatgtaatgacatgtatatgcatgtgtgtataactactcgcataagcagtaaacagcaatgaaacatgcataaatacgaagaacagagtgtacccagcggagggaccgatgctcaaggcaccagtggctccattcacacgagacatctcgtgtgtttgttcgatgtagccgtacgaagtcggtgcaggaagatgtacgcagtgcagtccctcgaacggtcgccgggaagaagaacagcagcacgcgtcaacttgggaaggcgacgaacagcaaggctgtggacgatcacgcgagcagtcgcgaagacgctccccaaaaatctgatcgcccgcacacccgtgcaagtgtatctctacggtcggtgatttcggaggcctgctctcccactctctctgtgctcgcagaagatgggacgagaatgtgttgtttgcaattcgcgtgagatgattcgcgtgactggaagagccctccctctccattcttataggcggtcagaagaagggagaaggacaacggacagaaacggtcacgcattagagctggaaactgacgccagtaactgacgtccgttactagccataagacaggaaacgga

SEQ ID NO: 624 - protein, 142 aa, Zea mays
MDERGEKEEEHGVVEEETAAVVLKEVEVEMEMVGGSEEASAAPLLLAHPCSLLQLLLRACAGCLVRLLHGHCSDGANDDPKAAADDDDAAPEAAAAAAAAAGDGGDKAATYLYMQEVWAVRRRPTTPGRPREGSGGNGGNHH

SEQ ID NO: 625 - DNA, 4545 bp, Zea mays
cgaaaagagaggaggcaagcagaggggaggggtagagtggatgaggggattagggacgggtgtactaaatgggcttcttttttcttaatgggcttcaatagttggtttggcacagcggaaatcctagtccgttcagactccaaatcggcccagtagtgtcaagccagttttgatggatataatagttccttttttttgaaaaataggattagtggcattttgatgtagtctaactgtctaaggctctgtttgatttttgtggtcactaaattttggaccactttaactcttaacacttcaaatatgatatctaaattgttatcttatctaagtgttattacacaactttacaactgaaagtttagaccatatgatccaactgaagtgaagtctaactttatccaaagacagatcggtgatacaacaatgccactccttgtggcttggcaatatgaaataaatactccgtgctaaatgaagactgattccgagtgacgacgatctgtgaacatcgatatgtcaaagagaacaaaatcttgctagttactcctgcgagaactaaatcttggagtaaatgacccagtatctcttgctagtgcagagcaaagacaaaaaaaacgcatcctctttcccgggcactaagatggcataaagtggcctctttaatttcaaagggtcacagcacaggacagattctgcacttagttgttgtgactggtaaagcacagtgaacgaagaacatctgaagttgcaaggagcgagtttgtgccttgcagcgttgcactgacatctgtaagtgatgagcaaagtttatccgttttcgaatattcattgtcaaatagtttatttttaaactaaacgacgacaaataaaaaataactagtacaaggacctcgaatagctaccaaacgtagccccgggaagacgccgattcgtgccgacgaaagttatcctctgaatttcacaaagggattccctttcaaaaaaaaaaattcacaaagggattaggcgcactccacccatcatctagctgtcttgagagagctgagccaggagcggagggaagaataccacgcgctgggtccgaaccggagctggactggattcttcaaggcttccattccattccatggggtaaagcgatcccattcccactcctatcgtctgcctccaagacaacagttttaatctgcttgcttgcgctctgctgcctctggttcacgttcaccgcctctattccatggggtaaagcgagcagttttaaatacgagaggccctcgcttgtcactgaagccgcggcttcttgtgccttgcaacctgccgttggggcttcttctctacaaatacgttgcgcgccatggatggcgactcgaagaagctgaggtagaagcggtgcacgcagcagggcctagagcctccgtctgctgaagggtttgatcctgatttcatctatgtgtctggcaggcttcgggttgtcttctttttttctccgtaaaagctgaggtgaaaaaaggttatttgtgccaccagaattttagttttggagatttagaatcggaaggacgttgcattcttgcgatcatcgggtacgagcagattcagatttgacagtttttttttttgtgtgtggcagggttcggttttctggagtaggaaagggaggtagaggtggacgccagggttcagcgataccacctcaagaaagcaggcctattggaataggtaactgatcaaatatacaatgattagtagctaggctttcacaaacatgaaacgcagcggaaaaaacagactaacagaatggcaatgtgacgtccagcggaaatgaacagcagcggggagtacgatgctgcgttcgcagccacaattgcagcagcagcatttgcaatcgctgcccgtgaggataagctcgcggctcaaaagaactccgtccccatcgaggaggtgaccccttccctatcgccagtcaatagagctgaaggcaccaaaaagcctgcaggaggcaacaaaatcgcgagatggtttagcggcaaggagcctatagaacacgacgacgacgacgaggggccaggtagtgtaaacatgttctaccttaactcccattctttttgccacgtatactgtagcaaaacctgcagatctcttgtaacaatgctgaaacgaaatgaaatatcctttcagttaatgtatcggtaaggaggccactgaaaccagcacctggaaagcctgaggacgtgcctgcagatcatcacaaggtggcacccaggatgcttgagacttctctgggtgtgaggaagggttcgggatcttccagcaggtcggcagagaggaaatggagcaaggagtttgagcaagaacaggctgttcagaaagcgccctcggccgtgaggccagccacgtcataccgctctggacggaatggagaaggcgcggcaggagtagctgctactggcggcacgggatctaaggctgatgaatgggagaaggcaaagcttggaagagttagagaggagtgagtacgatctattttttttattattctgaaggtcactcgattgaagctatgctgatatggagttatggacttcaaatttaggtatgagaagatgatggagaccatagccgaatgggaaactgagaagaaggtgaaggcgagacgccaaaaagagcagaaagaggttttagtttcgttaattcattcgtagtttaaagaacactgctactgcactattaattcagtatttccttcgtcgaaagcatccgtagtacaagccccaaaccctaaaaaatggtatcgctaggaattcgtcatgacaacttatttgattaaatcacattgtttgaggatactcagagccgagcttcttaactttgcagaccgagctggacagaaagagagaaaaggcactagaagaatacaacctggagatgacaaggatcagcaaaatctctggaggagcaagggcgatggcggaggagcgaaaatacaacgataggaaaaagatcagagagaaggcgcgcaagatgcgatccacaggaaagcctccccgcacgtgtgcttgcttttgagaacagctgcatacgctgaaatttggaaccaaaaccaaatgaaggacgtcattttggacggttgtaaaaggcacgcaatagtgacgttctgtattgtaatatgtatttggctttgacaagttatgagtgcacattccactgaaggcaacatcaacatatttttgaagggtgtggagttaaggaataaaaaaaaagatccaccatgcatcaacattcaagatgaagcatggagtaggaactgccccaagaacaacgagaacgaaaacatatattcatcataaaggtcaagatttaggattcccattcaaggtataaggtgtgagactagtatcatccaattcaagtgctgaggttcttcttgagctttggccaccagacttctcagattcattcctatttttgttgattgttgtctcctcatcctgtgtaccagattcatctgattccacttaattcaaaatcatactcttcataaatttggttatccgatagttcttctggtgactgatgaggaataaatatccttgatttcagtccaccctgttctgaagtattttcatcaccaacaaaaacacttggtccagtcagcatggacttcagcttctcatgaagtccaccatctgatgaagtttctgaaactgattggcagtgagaagcaccgttgttcatcctactgtcaaaaactttaccagacgtatcattgtctgctgcatttctagaagcaaaatcaagacaagactcaggctcctcattatgttttttttgtcaagtaccagtaacctcggagatctttcaaaatcttcatgaactcccattccttccttacctttagagattagagactccacagatgcatgactccagcttgatcatgctcaattttttttattttacataaatagctaaaaattgactaaaatggtaaaaggggtactttttagtcacttttaggtctttgtgtttggacctttagcttctcaaataactaaacgtacttcgcattagctcactagatccaaacatgttctaaagagaaaaaatcacagcacaaggacagttgacagcacagaagaagggaatttactgtctgctgaagggaaccaaaggctccctacgttgtccctccaagcagaactattcagcaatcagcgtacgcccaaaccaccggcaacggcaacttaccctgttgctctagcagccggaaaatccgacttcgcatgtcttttctccacaacagcaacagcatgaggtagctggccttgcatcctttcactaattcacacttcgacgatcactacaggtaccagatagaagtggcagaatccagtttccactgactgcaacgccaagaacataagtagagagaaaatgaaaaatcatgcattgatgacaaaaacaaatgcagtagtacgtgtctgccgagcaacgcagcgcacagcagacgatgagaattcagacatgtactaggtgtgtgcc

SEQ ID NO: 626 - protein, 316 aa, Zea mays
MGVRFSGVGKGGRGGRQGSAIPPQESRPIGIAEMNSSGEYDAAFAATIAAAAFAIAAREDKLAAQKNSVPIEEVTPSLSPVNRAEGTKKPAGGNKIARWFSGKEPIEHDDDDEGPVNVSVRRPLKPAPGKPEDVPADHHKVAPRMLETSLGVRKGSGSSSRSAERKWSKEFEQEQAVQKAPSAVRPATSYRSGRNGEGAAGVAATGGTGSKADEWEKAKLGRVREEYEKMMETIAEWETEKKVKARRQKEQKETELDRKREKALEEYNLEMTRISKISGGARAMAEERKYNDRKKIREKARKMRSTGKPPRTCACF

SEQ ID NO: 627 - DNA, 5878 bp, Zea mays
tgttttttatcttcctttcgtcttaataaagatccatattacatttatatttactatgtcatatatatacctcactatctcgaagatacatctcgttgcggaagcataaggtagctttggaggtaaagcttagagcgacatgtgggtgcaacaaacaaacatgggggcacaacacacctcacctcatataactaatttggcttgcaaatcgagagtcccgtacgaaaagtactcgttgtctcttgacccaataaatcaaatacaccttcttacacaatttgtccattttatatttttcgtttccaataacaaactcaaagtgacttgtttttttggacctttgacacatagcctttaaagtagatttcacaatttaagcttgttatgtaaaacaaactaatttcgagagaggctgattgaggagaaagtctgcggtcgatgattcaattggacgaaatcgatgtttaaactgtcttgttgattaaatttctagcttcacacgtgcttgaacggcgtaggaagtgttggaatttcccttcttatgatttattagagtagagttttgttacagtttatttacggattcattacggtatttattagggatacgttgacatataacttcagtctttcttttttaatagtcacaagaaactttcacacacctactaggagtaacagaaaaacatggacatattgatttttgaaaaaagaaatattgacagataaggtgttggggaccgtagagactagagaggatgaggacgacgccaggcagacgagccttgccgattgccgtcgacgtcaccctggtcaggcgtcacttgacgacgtatacaggggcacagggctcaggttttccttcaaattgcgccgaaatactcgagatttcttggatttttttacttgtttattctattctccttccggcgcctctctagtctattctccttcctcgtcgagtcgtcgtcttcttcgatccactctttcccccatccctatctccctactttccacgcaactgcgtttcccccggactcttcttccacgattccgttggacccctaccgctcctcagtcagtcctcgcccctcccagcaccggccaacaatccctcacgttattccctgtagctactatgctgccctcttggatccctttttcacttgtctgagatttagccaccgcccggtaggaagaagaaggggaagcaccatattttctgttcctggcctgacgcagcgccggtgagatttcagtccgggatcggcaacgctgggaggactcgcgtgtgatttacgccgacttccgtgccgctctaggaagggtcacgtcgaggaggcttttgccgacgcggatttgcctggagccagccaagcagagcgcagaattgggggtgtttggccgtgcaaagccagaaagttctcggtttggctgccgaaaccgcttgaggcgaccaccatctcatggtcgtagtggtccgggtccggcacaagtaggggctcgcgtcttgcgcttggcagttgtgggaagccatggagccgtcgtcgtccatcacgttcgcgtcgtcgtcgtcgtacctgtccaacggctcgagcccctgttccgtcgcgctgccgccgccagggccgccccagactcccccgttgcctgccggccaggggtggggtggtggagtcgctgccgcagggagcggaggcagcgtggaggccgtgagcctgaaccggctcagcaaaaacctcgagcggctgctcctcgacccggacctagactgcagcgacgccgacgtcgatgtgcccgacggtgggccgcccgtacccatccaccgctgcatccttgccgcacgcagcgacttcttctacgacctcttcgccgctcgcggccgcgcaggggcagcgcgcggtgatgcggccgccggcgccggagtagccgcggagggggctgccagtggaaggccgcggtacaagatggaggatctcgttcccgccggccgcgtggggcgcgaggccttccaggcgtttctggggtacctgtacaccggcaagctccggccggcaccggtcgacgtggtgtcttgtgctgacccagtgtgccatcacgattcgtgcccgccggccatcaggtccgcggtcgagctcatgtacgcggcgtgtaccttcaagatccccgagctcacctcgctcttccaggtgagacgcaatttggttcttgctcgccccattgtcaataggattaaactctaatttctttaggaattgtttcgttctatgccaatactgtacatggcttcggtagactagaaatggatttgtgattttttttctccaatccgagtgttgactacatcactacaaaaagctatcaatagctgaactgctaaaattgctgattttgttttctccaatccgagtgttgaccacatcactgcaaaaagttattaatagctgaatcgctacaattgttcaattgttgattttgttttttccaatccgagtggtgacactacaaaaaactattaatagttgaactactaaaattgttggctattgcttttttagttgattcaagcgaacctggtggcttgaagtctatgaattgaaatggaatcattattcattaggctgctcaacatttgtatattacatttatggctgtataatttatcaatctgtttaacatcaattcagctttgctttgtcgatttatggaaggcaaatggttaacatggtcttcttctacagcgccggcttcttaattttgtagacaagactctagtggaggatgttattcctattctggaagttgcttcccactcagggctgactcaagtgatcgacaaatgtattcaaaggattgctagatcagatctcgacgatatatctttggataaggagctccctccagaagcagttgatgagataaaaaatttgcgcaagaagtcacaaactgctgatggtgatacgttcatttcggaccctgtgcatgagaaaagagtcagaagaatccacagggcacttgactctgatgatgttgagcttgtgaagttgcttcttaatgagtccgacatcacattagatgatgccaacgcattacactatgctgcttcttactgtgatcctaaagttgtctcagagctgttagatttggcaatggctaacttaaatttgaagaatagccgtgggtacacagcactccacttggctgctatgaggagagaaccagctataatcatgtgtctccttaacaaaggggcaaatgtgtcacaactgacagctgatggcaggagcgcaattggtatttgtcggaggttaacaagagcaaaagactacaatacaaagatggagcagggtcaagaatcaaataaagataggctgtgtatagatattctagagagggagatgatgcggaatcctatggcggtggaagatgccgtcacctcgcctttgttggcagatgatcttcacatgaagcttctctacctggaaaacagaggtgaagtccataccatgcttgatagaatggctctgattggttgcctgttgccgcttcaaattttgaaaatttaaaagcttggaggtcaggtggattgattcaggctagcttgtagactaatgacatgtgcctgaccttttgttctcataaagagggaaaaaggaaaacgcccaccccataccacatcaatttctcctttttttcaaattggtgaaagctgtacatgttgtaggaaataaacaattgtagtcacaaagcccaaattaatctaattacagatgacaagcctggattattaaattgccacttgcctgtccatattgcacacaacctagtagtgtcctagttctagataatataacgagaatgatttcacaccactggatgatgatcaaatagcaccttagaacttggggttgggatatgtcattgtcgtgagctttgtcttatgttcacgtttataagaagattgtgatttatgttattggctacattattttccctgcaccataacattctaagtattgttcctgcagttgcatttgctagattgttctttcctgctgaagccaaggtcgccatgcaaatcgcacaagcagacaccacagaagaattcggcggtatagttgcagttgcagcaagcacttctggtaaactgagggaggtggaccttaatgagacgccagtgacacaaaacaaaaggctccgttcaagggtagatgcactgatgaaaacaggtgaaagtttcaaccgtcaaccttttccattgtagtgaacatgccctgcagctatctccagaaaatttagttcggacgcaatcacggattctacgtgtacctgaagtattgtgactatgttcaaaatacatgattgatacaatgtatctgatctggtgttcgcccatttttatccgatgacttcttgcagtggagctgggccgtcggtacttcccgaactgctcgcaggtgctggacaagttcctggaggacgatctgccggaaggtctggaccagttctacctccagaggggcacagccgatgagcagaaggtgaagaggatgcgcttctgcgagctgaaagaggacgtgctgaaggcgtttagcaaggacaaggcggagggcagcgtgttctcgggcctgtcctcgtcgtcgtcgtgctcgccgccccagaagtatgcccagaggtgatcaaggcaccagtttttgccgtatagtttgttatcatggtcttcgagacttggacccggacagcatatagggacatgtacacctgtgtatgtatagtgcttacaattggcgtaagtagaactatatgtatggaacataaggaaacatggcaggaacaccgtgcaaaaagatgaaaagatggccgaagtgctctatgcgagtgcccacctgattcgatggccctattcaacggcgccctgtcagcatgctgcatgcccactgagaccttcggttgcatagggataggaggagatttctgttcaattttggctagcaagtgatataggggtgtttaggactgtttcactttatgaaaatcaacttagctcataaacacttttaacttcaataacttaggtcctgtttggagtggctgtatttttctagtcccaagaaaataatgtggtatctgagaataccatggtctagaaaccaaaatgtgtttggcagactcttttaaaccatggtatttaaaatcttggttttgacaagaccacattatttctgggtatagaatactgtccagactagggctggaaatgagccgagttcggctcggctcggtgcggctcgttgactgaacgagctcgactcggctcgtccattccacgagctggtgaaagaggctcggctcggctcgaccttagctcgcgagccatattcttgtacttatcgtttcattatttgatgaattaacattatataaatttgaaatataaaatcatcattctacattatgagtaaattaaactataacttgtaatatattcatcatcaaagactaaaaaataagctattatccataaaattatctaatatttattattattccataaattgatcatttttgcaaggctcgtgagctggaacgagccggctcggctcggctcgctgcaaaaacgagctcgaagaaggggctcggcttggctcgttcgaggctcgcgagctgcgccgagccgagccgctccgagctcgagccggctcgcgagcctcgagctaattttccagccctagtccagaccaaagtttttcgtcagagcgcgcgaagcgaccctaatgtccgcgcccttttctcaccgtccacgcatctcttcccctcaattctaaggctttctccaacaagaaacgttaaagcgttcggtacgctatatttagcgtgt

SEQ ID NO: 628 - protein, 621 aa, Zea mays
MEPSSSITFASSSSYLSNGSSPCSVALPPPGPPQTPPLPAGQGWGAGVAAAGSGGSVEAVSLNRLSKNLERLLLDPDLDCSDADVDVPDGGPPVPIHRCILAARSDFFYDLFAARGRAGAARGDAAAGAGVAAEGAASGRPRYKMEDLVPAGRVGREAFQAFLGYLYTGKLRPAPVDVVSCADPVCHHDSCPPAIRSAVELMYAACTFKIPELTSLFQRRLLNFVDKTLVEDVIPILEVASHSGLTQVIDKCIQRIARSDLDDISLDKELPPEAVDEIKNLRKKSQTADGDTFISDPVHEKRVRRIHRALDSDDVELVKLLLNESDITLDDANALHYAASYCDPKVVSELLDLAMANLNLKNSRGYTALHLAAMRREPAIIMCLLNKGANVSQLTADGSSAIGICRRLTRAKDYNTKMEQGQESNKDRLCIDILEREMMRNPMAVEDAVTSPLLADDLHMKLLYLENRVAFARLFFPAEAKVAMQIAQADTTEEFGGIVAVAASTSGKLREVDLNETPVTQNKRLRSRVDALMKTVELGRRYFPNCSQVLDKFLEDDLPEGLDQFYLQRGTADEQKVKRMRFCELKEDVLKAFSKDKAEGSVFSGLSSSSSCSPPQKYAQR

SEQ ID NO: 629 - DNA, 3255 bp, Zea mays
ataagtcgtcctagacaaagtttgagtcaaacttgtaaaactttgactacaaataggtgtttcattatgtagttttgaaacataatagtcatatgcaccgatttatctttaaaagtattttcacaaaagtataagtgtattgaaagttcatttgtattttaacaaaaaatttggactaaactatttttgtcgtgtcgttgtcctaatcgacttataatttagactttgatggagtatttgcaagtactgtaataatgtaatactccaaggcggtgactaagaaaaatccatggatgatctatactaagggcgtgttttgtcgtggctttgctccactacagagcagctctactccaaagctctaagtggaaaagctatactctagagtttaaatagctttctcataatctgtgacagtggtgagtaaataactccaaactccatgtatggatttctttttagagttttcggagtaggaaaagaggtactataaggccctatttgagatagttctagctttagaaatttggtggagttggtagaacaggtcattaggtgctctagaaaatcgtggagctatatataaatcattttgtttattatttagattaaaaatatttttaaaactatttaaattcatattataaattataattccacactagagctgaaacctgtagccattctaaacactccttaaaaatttatactacatctctcaaaactccatagagtttgtaactgtggagttcaggtgttggaatagatctgtccagctcctcattagagagttttgttttgaatccataccgaatacaccttagtcttaacttagaataaagagtggtggtaaaccggtagtggtagggggaaaaaaagagaagcgaggcattgactttgcacagcccagcaggcagctcgtcgtctagcatttggtcctctcgttcgcacctccgccatttctacctataaaactcaccctccacctgtttcccacctcacaatcccacaacccaagaagccacaagaaagcagcagcagcaccgcacggacctgacctccaactacaagcgacgatccaggctccagagccccacgcaaggccggaaggagacaggcagcagcccggcagagcagctaagccatggcggtggacctcatgtcctgcggcggcggggcgtacgagcaactggcgttccaggaggcagccgcggcggggctccgcagcctggagttgctcgcttcctcgctctccccgtgcggcgcggggcgggcggagtcgccgccgctcgggcagatcgccgaccaggcggtgtcccggttccggcgcgtcatcaacctgctggaccgcacggggcacgcccgcttccgccgcgcgcccgccgtcgccgcggtggagcccatagagacggagacgccagcgtcacagcaggcggcggcggagccgcctcatcaggctcagaacaaagccctgacgctggacttcgccaagtctgtcccgccggcagcgaacaagaaggccccgcgggcgccggccgtgtccgcgacttcgacctcgttcctgtcgtccgtgaccgcgggcggcgaagggagcgtgtccaaggggtgcagcctcgccgccgtgtcctcgggcaagccgcctctcccgaagcgcacgtcgccgtgccccgccgctgctccgccgggggcgcaccacgccgagtccggcgctggaggttgccactgctcgaagaagaagcgcagccggcagggcctgtcccggcgcacggtgcgcctacccgcggccgcggcaacgccggggtcgcagccgcccggccacgtgccggcgtcgtcggacgtaccccacgacgagtactcgtggcgcaagtacgggcagaagcccatcaaggggtccccttacccgcgcggctactaccggtgcagcagcgccaagggttgccccgcgcggaagcacgtggagcgcgccgccgacgacccggccgtgctcgtcgtcacctacgagggcgaccaccgccacgacggcgacggcgacggcgacggcggcgttggcgctggcgctgcccgctcccgcgcggcgtgaagatcgtttgcttcccgccgtagcagtcagtgtagcagcggtagtcaagtcaatcgatactagtagtagacctcttgtttcatttgttcttcggattagtggtagatcgagctttgctcctgtaaaaggaattaaagagcatttaaacttaatctcgccatgaactttctccaaatctacgtattattttatcttctatgcataagcgtcaatttctcggggattatatatatatataataattgtaggaaatatgatacacacagatggaatttgggtggtgatttgaagtggtcgcagcaggttcctttggctctcaactctcaagtcaaagaaacggacagggcatgggcacggcatcaatacgcgctttaaagtatcgtgtcgggtttgggtgcatggggcccatgaccacaaagccggtcaaaagcagtcgatgagcggtcgctttcgcgttcagggacggttggcccgtttggggctgtgccgttgggatatccgtgccgctgtggcctgttgttgtgtccaagagttgactggacagcgaagaccccgtcctcactccccagaagagcgcgtgcaaaccaaggacgacgcgtggacccactgtcggacagcgtaacggggtctccttcttgttcaacggcacagccattggtggcgcctggcatagcgtttctcccgtccgtttttattttccacgcgttgacttttggatcagctggttgtagccgaagttgctactaggtaagtacaaagcggtgcttgtctgaccagcatgtcttgctcgcctcgccaagcaaggttaggcttaccagcgccggagggcagttttgcctggctcgcgttggcaaccagaaactttgatactgtatccatgtttaaagaaagagaaatcgaactcgctccattccaaattaaaatatgttttagttaattgatagggttcatataatacttgatataatacttgatgtatgtgttatacatatatgtctaggttcattttcatctatttgaatctagacataaaaactgataagagctacaacgactagcaaggagtatattgtatgaggtgtggagaactagcaaggacatcgttgtggacctctacgtacaaactattgagcactagatttggcatctatacacgatgggatggtatagccatg

SEQ ID NO: 630 - protein, 311 aa, Zea mays
MAVDLMSCGGGAYEQLAFQEAAAAGLRSLELLASSLSPCGAGRAESPPLGQIADQAVSRFRRVINLLDRTGHARFRRAPAVAAVEPIETETPASQQAAAEPPHQAQNKALTLDFAKSVPPAANKKAPRAPAVSATSTSFLSSVTAGGEGSVSKGCSLAAVSSGKPPLPKRTSPCPAAAPPGAHHAESGAGGCHCSKKKRSRQGLSRRTVRLPAAAATPGSQPPGHVPASSDVPHDEYSWRKYGQKPIKGSPYPRGYYRCSSAKGCPARKHVERAADDPAVLVVTYEGDHRHDGDGDGDGGVGAGAARSRAA

SEQ ID NO: 631 - DNA, 30082 bp, Zea mays
catctcaaattctaaattgactgtccgaaataccatagattattccaagcaggagaagcttttggaaaattcacctgtgcgcggaccgttcacgacacctcggtgagcgttggacaagaactatgcaaaactcacatttctactatggactgtccgaaagtgagaagaacactgtccgggatcaagcttagaccgtctggccattgaaaaccagagaaacccgaaggtgacgggttcagtaaaatacatttttagcgtcttcggagactgttcggggtgcacgaccggaccgtgcgcgactgctttatctgatatctaacgacatatttaatgtatttatagccgttgatatagccgttactgctgatcattgcgatttcagtcattgatgtgcagtggtggaccgtctgggccaggagcgcgtaccgtccacggttggcagaaagtgggcaacgactagaaagtggttggtggctataaatacaaccacaaccacctccattcacattattctagcatctcattcattctcattcaatacaaaatcaagcacttcattccaagacacattcaaatcaaatgtgaatggataagtctctgatgtatgtttgcaaggatagcatatcaacaagaattatcatcataacttaatagattgataacaaagttcctccaaaaaaatctttgtatcctatgcacaacacataagagaacaaaacgtcattttttattacgtatttatatggttctatgtctatgtttaatcatggattttgatgtactcacgagtcacatcgcccgtcgatagggccctaagtcgttggagactcgtcaatttatgttctgtgacatcgtacgagcacatacctaataagaaattaaagttacagtgaaaggaccatcttgtccttcaaaccctagctagtttttcctatataaaccctggggggcgtacatatatatcacgcatcaaactagtagcaaattaataatccagcgaacacactatactagtgagcaaataaagccaccgatgtcatcactcctgttgcgagtgctgctcatccagcttgcagcagtggagtgcctctccgccgcgattccaggctgcctaacgcaatgtggaggcgtagagataccctatccattcggcgtcggcaccaactgctcccgcaaagggttccggatcaagtgcatcaacggcagcgcgggcgaggagattccagtgctgctacctactacgcgctaccagaacatccgggtgctgaacctgtccgtgtcgccgttgccggaggctcgagtgcttcttccggtggcatggcagtgcttcaacgccaccgggggcgtcactgggatctactcgggagatgtggacttcaacccagagggcgtataccgcatctccaacacacagaacgagctcttcgtcctcggctgcgacacctatgcgttcaccaaaggcgtgagggtgcacaacgttaacgcacgcttcccttacagatacttcacggggtgtatcaccgtcagtgtagacgacaaggacccgcgcgacggtgcctgcgcgggcctcggctgctgccgcgtcgacatcccgccaggcatcacggacaccagcatgaccttctcgtctacctggacgcgtgccaaccagaccttctgcccctgcgactacgccttcatcgtggagaagggcaactacaccttcaaggcatccgaccttgtgtcgcacacacccgacaaccgtctgcctttggactggtggaccatgccactgcgtctcgactgggccatccgcgacaacaacggcgactccatgacttccatctcctgcgcccaggcacccaacgaacctgactatggctgccgcagcaagcatagcgagtgcactaattcaaccaatggccctggctacttctgcaagtgtgcccatggctacgacggaaacccctatgtccagagtgatggtgaatgcacgagtaagtagtatatataatccccttcttctcaatctataagtggttttatttggttattttaaatacatcacttttattattaactatatgtatcccgatatatatatctacctcattgcaattttgcccgtaccttgtttgtgatggcaaatgtcctaatcacttctatatgtctttcagatgtaatttttctatcctttcatgctatcgtcagtggcacaaaaggataagtacatgtgattttcttacccttttacgccactgacgagggcatgaaaaaggtaagaaattgcatccgagtgacatagaagagattaggatgtactggacaaaattgcggtgacatacgtagaattttctctatatatctagtaatgcatctagaaaaactaaattggcattatttggagcaggactggtgtatattctcaaggcacggtgccatactatactcattatttaatatataccatgtaggatagaaagctgatgtgacatttgagtaaagaaggaagaaaataaaacaatatcttgagggagatgccacttagacacgagatcataggcattgaaacctaaaacaactaaatgaccacaattcattctctcatacacaattatcgttaaattgtcttatgtgtggcactatcggaattcgcctttttgccgggtgccaaatattttgccgagtgttttctttcaggcactcgtcaaagaagttttttaccgagtgccagacaaaaaagcctcggtaaataaaacactaggcaaacaagatctttgtcgagtgttttatttttgacactcggcaaagacaatttaaaatcatattttaaagcagtaaattaattcaaatgaaaaaattttaactacaaatttgtataactcatcatgatgtacaatttatattttgaacatttcttcatatgacaaaatataagtaaatttattcataaaatctatatctctctcgtagtttataaaactacgagagagatgtattagatttgtgcatattgttagaaccatcatgtgagattaacaagtgaccaaaccaccgaaataaactttgtagatcttgagaagttatagaagtttatagttggcaactttttcatttgaagtcatcttgtcaactaaaactacgtctgaattttaaaaatttaaaatttgaattttgaaaacgacctcgaaaaaaaaccaccaacatgaaaattgtaggtattgaagggttatgaaactttgtagttgacaatattttggtttgaaatcatcttgtcatgcaaaactatgattgaattttaaaatttgaatttttgaaactacctcgaatggaaaaaccaccaaaataaaagttgtaggtcttgaaatataataaaactttgtaattgacaaattttttattttaaatcatcttaccatttaaaatttcgtgtgaagttttaaaatttgaaattaaagttttgtaaacaatctcgtatgtagaaactatcaaaatagaacttgtagatcttgaaaagttatacaactttatagttgttcacattttcaaatgaattcatttagtgtctcaaataatcagattattctcgggttgttatagtacatgggaatgaaaacgtaatatagacataattgatgtagtagtgtagtgcgcgagagaggttgcaagttcgaatctcactattcataaaacatgtaaattttattcaaaataatagtgaaaaatgataggataatggggtatggtattgggtagtggttggagagttgttcatataatttagaaaatgttttgctattttttggggttttttttgcgattcctaatttaccgagtgtttttcgacactcgacaaagtctttgttgagtgtccgaaaaaatatactcgacaaaaaacccttcaccgataaaatatttgtcaagtgtaaaatggcctttgccgagccgagtgtcttagacactcggcaaagaacgtgagtccggtagtatggactatgaaacaacgtatggtaatatacacgggataactatatagaatcttcaataataacatatgagacgacaactttgaatactttgacaagaaatagtggtttggaaatgggctaagccatccagtcggtgagagggcacaagttgtcggactagtgtcgttgataataacggagatagttggtctgatgtcactgtccagaaatccatatgatcatggaattattatcaacgacaaatttgtatggccacacatcacatccatacagattcctttgtctacttcctattcgttgacaagaaattgtgatagcactcgcattattgttatgtcccgtttagatcattggaattgaattccattctaataacagtaattaggtatatactaattaactaattcgattttatgcaaaatatatttgtatactgttattaacaaggtatcggagatatttatatgtgctacatttttactatcgagaagtgagttgaaaatcgtcttgtaagttagagagtcgaaacaaattctattgatacataaaatcatttccaatcttccatctcatgaatttgagatagacttatatctgaaccttaaaaagtggtagaatgttaaattccaaggtaaatgtgttactttattgactgaattccagttccactaaaatgaaggtatatatccaaacgcacaaaagcgacaaagtagcaatgacttcaaccttttaaaaaaaggtgcctttaaaaaaacaaaagagcaggaatctgtttattaagattaattttccgaaccgtgtgttgaattcttttgagttctcacatctcaaaagatcgctccttgctttcataaattattggcaaacgactgactctcttttgtgactatttgaatgctcacaaaattaataattaattatatacagatatcaacgagtgccaagatccaaagtcacataattgttcaagtggcagcaaatgcattgacacagacggaggctattattgtcaatgcaatttcttccgaagagggcagcaatgtgatcccttaattcctatggctgccgttgcactgttaagtaagcacaaaattctattaacaccttgttacattacatcattctctttaatttgcacttagcttgttctgtttcgtcctaaaagtgactaaaacgacaaaacttttgcaccattttagtcatttttagctctttgtatttggacctttagctaccgggataaagtggccaagggagaaaaatgtaaggctatgagtcgccttgagttgtgatttgcgacaacacgggcgtgagcctatctagcgactagcgaggtttctccatgatttttttggtgatgttagcctggtttataatttaaaaaaatcatttatagtggtagttttattaataaaactgctattattgtaaacctagtgtctgagaatgtaaatatttatagtggcggttttttaccaatgtctggccttgcacacgtacgggcggttaaagaaaccatcaataagggctagtttgagaactccattttctcatggaatttctatttttccattgtaaaatgaactaatttcctttggaaaaatgaaaatccattggaaaaattaggtttccaaactagccctaaagatcagttttctaccgtaggtaaaagtcttttgtgtagtgtcctgataatttcttaaacattcaattacacaaatagaagaactaatagcgtgtttggtttgaggattgagctagtctatcatcttctcactcctcgatatttatgtttggcttgtagaatggaatgagttgatccatcattacctcattcctcatagttagttagttagtactaatgtgaggaatagggtcatcccaccaaatttgtgtaatgaacctatgatgcatcacctcaatttggatacagtgattccttaaaccaaacaccccctaagagcgttgcctaggccttaaaaaattctaaaaatgaataaaagaaacaagaatcattatgattttgagttagcaaaaaaaaagatagcagcaaccgactagatcaaaatttgaaaaactcaaatatagattcacggggatagatatgcaataagattcatgctatgttctgttagttgaatggttgaacatgcatgtatctttctcgaattctgtctgcagcaacatttgctgccgtcgtccttggatgtgtcgcaattgttttgcttcagactctaaacaacaggaaaagattcaacagaaatggaggtaaactactgaatgcccagggcataaccacctacaccaaaagggagctgaagaagataactaatggctacagcaaacgccttggaggagggcactttggcaatgtttacgagggcaccatcgtcgacggcagaaaggtcgccgtcaaatgtcctttgcggacaagggtgtcgtcgcaccgctgccattggaagaatttgattcgacctcgccgtgtaccgctaccgcaacagagggtggaggaagatgggtcgttcatgaacgagatcaggttccagttcgaagtcagtcgtcacaagaacttggtccagctcctgggatgctgcctagagaccgacattccgatcctagtcttcgagtttgtcgccaatggaagcctggaggacatacttcatagtgccaagaaaccatgtaccctctcgctgccggagcggctggacatcgccattggctccgcggaagctatcgcctacatgcactcccttgacaatcaaaagcgtgtccatggagacatcaagccttccaacatcctccttgacgatgacctcaatccaaaagtctctgactttggttcctccaagctcctggcaatccatagctactacgttagggcagtggctgcagatataggctacatggacccattatatatgaagaccgagcacttcacattggagtgcgatgtctacagcttcggcgtggtgcttctggagctcatcacgaggagaagggccagctggtatgaacaagatcaccaagggaacaagatcctccccatcgagttcgtcaagtgcttcaaggaccacggtagcggatgtgcgatgtatgatagcagacttgatttctcagctggcgaggatgctcaatctcgatgcaacaagcgttgcctcgacatgattggcatgttggccgtccgatgcctcaaggaagacaagagggagaggccaaccatggcagaggttgtcgaggagcttaagcgagtgaaggtactactgctgggtacacatatataaaataatggcctgcagcaatcaagcgagttcgaagcacgcagatgaatggaagcgaagcaagcaataagaatggtcggtcagcacatgtgaagcgctgaacatggcggcggtactgatacaagcaataataagggttcctcaactcaaataaatatacatgatttattctcttccaataaaacagcaatgtctatctgtaaacatagtaattcgcatgaattgcttcgctttatacttcttaatttgatgtatgtccatacaaataattgacactatatatcgagcaccaaaagtgacggacactatatatcgagcaccaaaagtgacggacggtccggccttagagcccgaacggtccgcggccccgcgattagatcaactcagttgatcatccttatctcgtgcgtggtgatctatctaatcacgtgtgagttgttagctatcttctaggaacaagtccatacctcctctactataaatataaagaagtatatctccgcaatcagatcaactcacgaccgattgagaacccacgaacacattccaatcgaatatatctactttatttacctttcttctcttaggagtagatgtagcgtacttctagtttatagccttccgcatatccacctccacctctattcgactctacgtcgtctagatccatcttgggtggtctgccgaccctaggatcttacccctcccggggggcaaaatctagttgttcattcaaaatactatatctcgactgcctcttaatttttagacaactccacgtcgtcttgggacgccccgagtgacctgtcgacccggagcgtcctaagatctctcccccaggtgcgagatctagattccagcgaggagcaagacgaccctgcgccatcgcgtactgtccggccctgtgcgcggaccgttcggtgcaacgcatggaagacgtcgctcctgcaccgaggtcgcgaaccgtccggcccagagccgtaggctgttcgcgtctccgcagagagcaccgccaggcggtacacccctagtgattggcgcagcctagatcggcgtcaacagacacattacatacgtgtgtacgggtaggcatattcttgagtactaggataagtattttattcattccacacacacgtgtaggcatcaccatgcggtattcaagctcttgtatattaactagtcttaaaatagccccattttctagcgtagcgcaatgtacacatgcacatgcatgtttctagataaaactccagcataaatcttgtttttttttctaatttcagttttccgattaaattcgaatttggtttgaaattcactcacacaatttgaaatgctcaagcaaataaaacttgagcatcagatgcaaggttatttatatttatttattattttatccgtttagatgaatgcttctaaacacgtaattcataaaacaacaattaccttaattaaagaagggaaaatctttctattcatttcaaaaacccaaattctagttttttccatattttagagaatattctaaatatattattcaacaaagaaatgattttactcacataaggaccttttcatttaactttataattcattttgtcaattgatttataaaaagaaaatacttaaaactataattcgtgattctaaactactcaaatctcactgaataattaaactagatcttgataaattttgttgatttaaaaactagggtgttacgtttcttttgccgtgttccacttttagatgtcatatgcaccttagacacatgtaagcatgaaccccttttatatgtatatataggtcaatctttttttagataatggaacaaaaataaggtcccaacctctacgccatccaagacagcgtacacagcgtatcgatacatccaaaaagcgcttaggctcacaaacagactcataaacctagtttaccaaagacagctagacgactaggccgcaattctatttgagaacttccacccaaacttagcgaacacctccataacgaccgactccaataagcggcatgccttgttcagatcgatcctcgcgtcctcgtctctaagcagcagcgaccaagaacgtgcccaatatgtcgccctgaaaataacctgcatgaaagtgttagccttggcgcaattaaacaccatatcatttctattcaaccatatagcccaacaaatagcagataaacctacacaaatctgatttctaaatgctggccgaataccagcaagccaagaaccaaacatgtcggagatgctagagggaggttgaattccaaaggtgatatgtattgtattccaaataaagcgggcgaagtgacattggatgaaaagatgttcaatagtgaaagtcgcctagaggggggtgaatagggcgaatctaaaatttacaaacttaagcacaacttcaagcggggttagcgttagaaatagaaacgagtccgagagagagggcgcaaaacaaatcgtgagcgaataaagagcgagacacgatgatttgttttaccgaggttcggttcttgcaaacctactccccgttgaggtggtcacgaagaccgggtctctttcaaccctttccctctctcaaactatcacttagaccgagtgagcttctcttctcaatcaaacggaacactaagttcccgcaaggaccaccacacaattggtgtctcttgccttggttacaattgagtttgatcacaagaatgaaggaagaaaagaagtgatccaagcgcaagagctcaaatgaacacgacatcactctctctaatcactaaagctttgtgtggagttgggagaggatttgatctctttgatgtgtcttgtattgaatgctagctcttgtaagttgtagaagagtggaaaacttggatgccattgaatgtgggtggttggggtatttatagccccaaccaccaaaaatggtcgttggaagtgtgctgtcgcatggcgcaccggacagtccggtgcgccaccagacactgtccggtgcgccagccacgtcagcagactgttggggttcgaccgttggagctctgacttgtggggtctctgggctgtccggtggtgcaccggacaggtcctgtagactgtctggtgcgccaactgcgcgtgctctgactctggcgcgcactgtagcgcattaaatgcggttgcagacgaccattgcgcgcgaagtagtcgttgctccgctggcacaccggacagtctggtgtgcaccggacactgtccagtgactcaccggacagtccggtgaattatagcgtagtgccctctgaatttcccgaaggtgaagagttcagcctcgagtgccctggtgcaccggacactgtccggtggcacaccggacagtccggtgccccagaccagggtgcctttgggttgtcttttgctctctttgtttgacccctttcttggtctttttattggcttattgtgaacctttggcacctgtagaactagtagactagagcaaactagttagtccaataatttgtgttgggcaattcaaccaccaaaatcaattaggaaaaaggtgtaagcctaattccctttcaatctccccctttttggtgattgatgctaacacaaaccaaagcaaatatataagtgcataattaactagtttgcataaatgtaagtgcaaaggttacttagaattgagccaatattaattcacataagatatgcaaggattgtttctttatatttttaacattttggaccacgcttgcaccacatgtttcgtttttgcaaattcttttgtaagttcttttgcaaatagtcaaaagtaaatgaataagattttgagaagcattttcaagatttgaaattttctcccctgtttcaaatgcgttccctttgactaaacaaaactccccttcaataaaattctcctcttagtgttcaagagggttttaatacaccaattttgaaaatactactttctcccccttttgaacacaatgagataccaatttgaaaatcttaaaattaggtggtggtgcggtccttttgctttgggctaatactttctccccctttggcatgaatcgccaaaaacggatacttgagtgaaatataagccctcggtaaactactttctccccctttggtaaacaaaatatgagtgaagattataccaaagttggagagttgcgcggagcgacggcgaaggatgagttgatggagtggagtggaagcctttgtcttcgccgaaggctccaattcccttttaatacacctatgacttggtttgaaatatacttgaaaacacattagtcatagcatataaaagagacatgatcaaaggtatattaatgagctatgtgtgcaaaacatcaaaagaaattcctagaatcaagaatatttagctcatgcctaagtttgttaaaagtttgttcatctagtggcttggtaaagatatcggctaattgttctttagtgttaatgtaatcaatctcgatatcccctttttgttggtatcccttaagaaatgataccgaatggctatgtgtttagtgcggctgtgctcaacgggattatccgccatgcggattgcactctcattatcacatagaagaggaactttggttaatttgaaaccatagtccctaagggtttgcctcatccaaagcaattgcgcgcaacaatgacctgcggcaatatactcggctttggcggtagaaagagctacggaattttgcttctttgaagcccaagacaccaaggatcttcccaagaactggcaagtcctcgatgtgctctttctattaattttacaccccgcccaatcggcatccgaataaccaattaaatcaaatgtggatccccgagggtaccaaagcccaaacttaggagtattaactaaatatctcaagattcattttacggtcgtaaggtgagcttccttagggtcggcttggaatcttgcacacatgcatacgaaaagcataatattcggtcgagatgcacataagtagagtaaagaacctatcatcgaccggtataccttttgatctacggatttacacccgtgtcgaggtcgagatgcccatcggttcccatgggtgtcttgatgggcttggcatccttcatcccaaacttgtttagaatgtcttgagtatacttcgtttggctaatgaaggtgccctcttggagttgcttcacttgaaatcccaagaagtacttcaactcccccatcatcgacatctcaaatttttgtgtcatgatcctactaaattcctcacatgtagattcgttagtagacccaaatatgatatcatcaacataaatttggcatacaaacaaatcattgtcaagagttttagtaaatagagtaggatcggctttttcgactttgaagccattagtgataagaaaatctcttagacattcatattggggcttgcttgagcccataaagcgccttagagagtttgtaaacatagttaggatactcactatcttcaaagccaggaggttgctcaacatagacctcttccttgataggtccattgaggaaggcactttttatgtccatttgataaagcttaaagccatggtaagtagcataggcaagtaatatgcgaattgattcaagcctagctacgggtgcataggtttcaccgaaatccaaaccttcgacttgtgagtatcccttggccacaagtcgggatttattccttgtcaccacaccatgctcatcctgcttgttgcgaaagacccacttggttcctacaacattttgattaggacgtggaactaaatgccatacctcattcctagtgaagttgttgagctcctcttgcatcgccaccacccaatccaaatcttgtagtgcttcctctaccctgtgtggctcaatagaggaaacaaaagagtaatgctcacaaaaatgtgcaacacgagatctagtggtaacccccttatgaatgtcgccgagaatggtgtcgacggggtgatctcgttggattgcttggtggactcttgggtgtggcggtcttggttcttcatcctcctcatcttgatcatgggcatctcccccttgatcattgctctcctcttgaggtggctcaactccttgatcttcaccttcatcattttgagcctcatcctcatcttgagttggtggagatgcttgcatggaggaggatggttgatcttgtgcatttggaggctcttcggatttcttaggacacacatccccaatggacatgttccttaacgcgacgcacggagcctcttcatctcctatctcatcaagatcaacttgctctacttgagagccgttagtctcatcaaacacaacgtcacaagaaacttcaactagtcctgaggacttgttaaagactctatatgcccttgtgtttgaatcatatcctagtaaaaagccttctacagtattaggagcaaatttagatttcctacatcttttaacaagaataaagcatttgctaccaaagactctaaaatatgaaatattgggctttttaccggttaggagttcgtatgatgtcttcttgaggattcggtgtagatacaaccggttgatggcgtagcaggcggtgttgaccgcctcggcccaaaaccgatccaaagtcttgtactcatcaagcatggttcttgctatgtccaatagagtttgattcttcctctccactacaccattttgttgtggcgtgtagggagaagagaactcatgcttgatgccctcctcgtcaaggaagccttcaatttgagagttcttgaactccgtcccgttgtcgcttctaattttcttgatccttaagccggactcattttgagcccgtctcaagaatccctttaaggtctcttgggtatgagatttttcatgtaaaaagaatacccaagtgaagcgagaataatcatccacaataactagacagtacttactcccgccgatgcttatataagcaatcgggtcgaataggtccatgtgtaggagctcgagtggtctgtcagtcgtcataatgttcttgtgtggatggtgtactccaacttgcttccctgcctgacatgcgctacaaatcctgtctttctcaaaatgaacatttgttagtcccaaaatgtgttctccctttagaagcttgtgaagattcttcattccaacatgtgctagtcggcgatgccagagccaacccatgttagttttagcaattaagcaagtatcgagttcagctctatcaaaatctactaagtacagctgaccctctaacactcccttaaatgctattgaatcatcacttcttctaaagacagtaacacctacatccgtaaaaagacagttgtagcccatcttacataattgagaaacggaaagcaaattgaaatctaaagaatctacaagaaaaacattggaaatggaatggtcaggagatataacaattttacccaatcctttgaccaaaccttggtttccatccccgaaagtgatagctcgttggggatcttggtttttctcgtaggaggagaacatcttcttctcccctgtcatgtggtttgtgcacccgctatcgatgatccagcttgagcctccggatgcataaacctacaaaacaagtttagttcttgattttaggtacccaaatggttttgggtcctttggaattagatacaagaactttgggtatccaaacacaagtccttgatcccttgtgtttgcccccaacatacttggcaactaccttgccggatttgttagttaaaacataagatgcatcaaaaaatttaaatgaaatgtcatgatcatttgatgcagttggagttttcttcttaggcaattttgcacaggttgattgcctagaactagatgtctcacccttatacataaaagcatgattagggccagagtgagacttcctagaatgaattctcctaattttactctcgggataaccggcagggtacaaaatgtaaccctcgttatcctgaggcatgggagccttgcccttaacaaagctagacaatcttttaggaggggcactaagtttggcattgtctcccttttggaagccaatgccatccttgatgccagggcatctcccactatagagcatgcttctagcaaatttaaattttttattttctaagtcatgctcattgatcttagcattaagttgagctatgtgatcattttgttctttaattaaagctaggtgatcatggatagcatcaacattaatgtctctacatctagtacaaatggaagtatgctcaacggtagatgtagagggtttgcaagattttaattctacaaccttagcatgtaatatatcattttcacttctaaggttagaaatagtgacactgcaaacatcaaaatctttagccttagcaatcaatttttcattttcatttctaaggctagcaagagagatattcaattcttcaatcttagcaagcaaatcagcattatcatttctaagattgggaattgaaacatcacagacatttgaatcaaccttagcaattaaattagcattctcatttctaaggttggtaataacatcatggcaagtgcttagctcactagataatttttcacatttttctacttctagagcgtaagcatttttaaccttaacatgcttcttattttccttaattaggaagtcctcttgggtgtccaagagttcatccttttcatggatagcactaattaattcatttaatttttccttttgttgcatgtttaggttggcaaaaagaatgcgcaagttatcctcctcatcactacaattatcctcatcactagaggtttcatatttagtggaggatcttgattttaccttcttctttttgccgtcctttgccatgaggcacttgtggctgacgttggggaagagaagacccttggtgatggcgatgtttgcggcgtcctcgtcggaggaggagtcggtggagttctcgtcggagtcccattcccggcaaacatgggcatcgccgcccttcttgtagtacttctcctttcttctccccttcttatcgtcgcccctgtcactatcactagataacggacatttagcaatgaaatgaccgggcttaccacacttgtagcatactttcttggagcggggcttgtaatccttccccctcctttgcttgaggatttggcggaagctcttgatgatgagcgtcatttcctcgttgttgagcttggaggcgtcgatgggtgttctacttgatgtagattcctccttcttttcttccgtcgccttgaatgcgaccggttgtgcttcggacgtggaggggccatcaagctcgttgattttctttgagcctttgatcattagctcaaagcttacaaaattccctattacttcctcgtgagtcattagtgtatatctaggattaccacgaattaattgaacttgagtagggttaaggaaaacaagtgatctaagaataaccttaaccatttcgtggtcatcccattttttgctcccgaggttgtgcacttggttcaccaaagttttgagccggttgtacatgtcttgtggctcctccacttggcgaagtcggaagcgaccgagctcccctcgatcgtctcccgcttggtgatcttggtcacctcgtctccttcgtgcgcggtctttagcacgtcccaaatctcctttgcgctcttcaacccttgcaccttattatactcctctcgacttagagaggcgaggagtatagtggtggcttgggagttgaagtgcacaatttgggccacttcgtcctcatcatagtcttcatcccctacggatggtacatatacaccaaactcaacaacatcccatatacttttgtggagtgaggttaggtgatatctcatcatatcactccacctagcataatcttcaccatcaaacgttggtggtttgcccaatgggacggaaagtaatggcgtatgtttaggaatgcgagggtagcgtagggggatcttactaaacttcttgcgctcatggcgcttagaagttacagacggcgtgtcggagccggaggtggatggcgacgaggagtcggtctcgtagtagaccaccttcctcatcttcttcttcttgtcgccgctccgacgcgacttgtgcgaaggggattccttttccttccccttgttgcgggactctcccgatggagctttcccatggcttgtagcgggcttctcgccggtcatcatctccttcttggcgtgatctcccgacatcacttcgagcggttaggctctaatgaagcaccgggttttgataccaattgaaagtcgcctagagggggggtgaatagggcgaatctgaaatttacaaacttaagcacaacttcaagccgggttagcgttagaaatagaaacgagtccgagagagagagagggcgcaaaacaaatcgtgagcgaataaagagcgagacacgatgatttgttttaccgaggttcggttcttgcaaacctactccccgttgaggtggtcatgaagaccggatctctttcaaccctttccctctctcaaacagtcacttagaccgagtgagcttctcttctcaatcaaacggaacactaagttcccgcaaggaccaccacacaattggtgtctcttgccttggttacaattgagtttgatcacaagaatgaaggaagaaaagaagcgatccaagcgcaagagctcaaatgaacatgacaaatcactctctctaatcactaaagctttgtgtggagttgggagaggatttgatctctttggtgtgtcttgtattgaatgctagctcttgtaagttgtagaagagtggaaaacttggatgccattgaatgtggggtggttggggtatttatagccccaaccaccaaaaatggccgttggaagtgtgttgtcccatggcgcaccggacagtccggtgcgctaccggacactgtccggtgcgccagccacgtcagcagaccgttggggttcgaccgttggagctctgacttgtggggcctctaggctatccggtggtgcaccggacaggtcttgtagactgtccggtgcgccaactgcgcgtgctctgactctggcgcgcactgtagtgcattaaatgcggttgcagacgaccgttgcgcgcgaagtagtcgttgttccgctggcacaccggacagtccggtgaattatagcggagtgccctctgaatttcccgaaggtgaagagttcagcctcgagtgccctggtgcaccggacactgtccggtggcacaccggacactgtccggtgccccagaccagggtgcatttgggttgtcttttgctctctttgtttgacccctttcttggtcttattgtgaacctttggcacctgtagaacttatagactagagcaaactagttagtccaataatttgtgttgggcaattcaaccaccaaaatcaattaggaaaaggtgtaagcctaattccctttcaattagtctctagagaactacacgaacaacagcttagatttcctttccaattccgttttgcaaggttatccttagtgagagtaactccattttttatgtaccacaggaaaattttaattttaagtggtatcttaatcttctagattgggtacttacgtggaacaataccatcacaaatcaataccctatagagagagcgtgttgagaataccccgcttttgtgtaaattctaaatgaaaatgtccctatcagatgtaaggctagtgttgaggacacatgccaccaatttgtaccatgactccaagttaatgcccgttaacgcccttcgaaaggtcacatttagcggcgtggtgcttagcacctcggcaaccgttgcggactttttgcgcacaatctgatagaggttgggataggcgattttaagacgcctatcaccaacccagttgtcctcccataatctagtttcctttccattatgaactttgaaacgtccgtaatgtaagaattggtctttcactttcatgagtccagaccagaaatgggaatctccgggttgtctttgagcttgggaaaggtttttatgtgacaaatatttccttcttagaagattttaccaaatgccttcctcattaattaacttaaagagccacttactcaaaagacatttgttttgggtttccaaattctggatgcctaaacccccacagtctataggcctacacaagatgctccacttagtgagcctgtacttcttcttgtgttcatcacattgccaataaaaacgtgagcgatagtagttgagttttttaagcacaccttttggtatctcaaagaaagacaacatatacatggcaaggctagtaagcacagaattaatcagaactagcctaccacctactgacaacaattttcctttccaactactgagttttttctgaaatttttcctcaattatcttccattcgttgtttgataacttcctatggtgcatggggattccaaggtatttaaagggaacgcaaccagttttgcacccaaaaagatttgcatattcatggtcaaattctttagcctcgccatagcaatatagctcgctcttatggaagtttattttaagacccgatagctgctcaaaagtacttaacactagtttaagatttttggccttatcgaggtcatgttccataaataggatagtatcatcagcatattgtagtatagagagtcctccatccactaagtgtggtactattcctactaagtcaacattattctttgctctctcaattaaaatagccaacatgtccgcaacgatattaaagaggatcggagacagaggatcaccttgtctaagtcctttcttcgtttgaaaatagtgtcctatctcgtcattgactttgataccgacactacctcccttgacaatttggttgatccaattgcaccactggggggaaaagcctttcatgcgcaaagcttgttggagaaaggaccaattgaccttgtcgtaggccttctcaaagtcgagttttaggacgacgccatcaagcttcttcctgtgtaactcgtggatcgtctcgtgtaaaataacgactccctccataatgtttcttcctgacatgaaagcggtttgagaaggcttaatgactttctgtgctactagagccacacggttcgtcattaccttggtgaaaatcttaaagctcacattaagcaggcatataggtctaaattgttgaatttgtttggcctctttttgcttggggagtaaagtaattataccaaagttgagacagtacaggggcagatttctcttatggaactcaagaaagaggcatagtaaatcgtctttgattacctcccagaagacttgataaaattcagctgggaaaccatcaggtcctggtgccttattatgttccattttgaagattgccttcttgacttcatccatcataaatggtgaagtaagaatttcattttccaggtccgttacctgtgggatatcgtctctaaccgattcaaccatggaaaatggttgggttctgatgcaccaaagaggtccttgtaatagttagtgataaatcttttaagattttcatcaccctcaatagtgcagttctcttgttctaaccggaatatcctcgtttttttatgtttcccatttgctaccagttggaagtacttagtattacagtcaccctgtaacaacttagttgttttggctctttggtaccatttaatttcttcctctcttagcatatgagctagacactgctttaagtcaagttcttgagcagtaagcatctgtgtttcggcctttttgtctaaatcatcagccttcttaataatttgctctttctcttttttatatgcaccactggtatttttcgcccaaccccttaggaattggagtagtctttgaattttgaactgccatttttgtagtggggtccagcctctattctcatttttccaaacctgtgtcaccatatccgagaaaccttctctcggaaaccagccgagctcaaatttaaaaggaggctgattgtttgagtgggttccacttcccgtgttcatgagcagtggagtgtggtcagaaatttctctcgtcaaagcttgaaccgttgtcaaaggatactttgactcccactcggtagtaaccaagatacggtcaagagtctcaaaggtgggtacgcttctagagttagcccaagtgaattttcgatttgacaatcccaattcccggagatccaagctatcaatgactgcattaaaaaggaaaggccatctatcattgtagttgtcattatttttttcatgttggtttctaatgatattaaaatcaccaccaacaaaaagaggtaggttttctttggcacaagtttgcaccagttcagccagaaaagattccttgaattcatcttgtgcagccccgtagaccgccaccagaacccaactaaagccatcatccttgtttcatagatggaacttcacatagaagtcaccctcatcaatactactgatgtcaaaaacttccagattaacacctagtaggatgcctccggacctaccgtgaggtttcgaccagtgccataagaagtcccgaccagcacaaatattattcaatgtactttgtgtgaaatcgtttttcctgtttcgagtaacgcaatgaagtctagcttctcttctttactagtatcggaaaggaacctaaatttagccaagtcaccaagacctctgctattccaaaaaaatcctttcattttgtacaccttttatgtttcttaacaaactttatttttgtactacctttgcttcttgaggagccttttgatttatttttcttaaaggcagtgtggaaatcacaacttaggtgatcattgtcctcatccataacctcctccagaaagtcaccacctaagtgtccaagagcgagattttcagattcatacttgtccacctcgtcattatcaaaatgttcaaactctgaaccagaaaaaaacgtgctactatctaattggggttcagaaatgtggagctcaagtctatttaaaagagaaactgaatttgagacttgtttgtgattagagcctagagatacccctagattgctaaccttagtagagataacatcattaggaaaagagaaagggcaagaggatatggagttacctggaccgtcaagattcctccatgcagccctcaacttggccttctccaaaatgtggtgatcagccccgcccgcaagccttgggcttgaacgtttgggctgcgacgccacctccttgatccccgcagcggccaccagcatatctgatgagagggcaccaagtccaggctactgcagccccctcctagaacaaggcggcgcagagacagccccacggcgcgcataaaacgcaaggcattcccgcagacgaccaggacacgattcctgcaccagatcagcagccaccattgtggcttctgcatcagccatcaacatggcctcagaaggagatccaccaccgcacacaccatcatcagatacccctccaaccacagaaaacgcagcaggcaatttgtccaccagcacaccatctagtgagccaccattcacaaccttcatgggacaatcagtaggagattcaaccaccatgtcaatagaaatgccatcagctgctccttccaagtgttcaccatcttcctccgcgataactttatcaacacaaaagtcaagcgtcatatccacgaccatatccataatttcatttgccattttcctgattttttcctccgtatttactccatgctcaagtgccaaaacaggggctgtagaggtgccaccaggggcagccccacccattcccatagaagtgtcactttcattttggcagccagagaggtccttcttagagcgcttaccctctctgtccaagctactgctatcattgggattgtcttcctccatgtcctcattgtctccatcatttccatccccaaagttctggtttacttcatcaccgttttcatcaaaacccaccgattcgacctcgaatcttaattcaaagtagtggtcgccgataacagcatccaactttgtcggcaacaacttgggatccaacacagcaaccaacacccgaccaaaattgttcttgcgagtagtttccatatcaaccgtttgtgtagacccaagcatagacctaatggcccagagattcaaaaattctctcaatttcttcctgattccagtgacccgaatccaaaccttaggtaacagaaaaccttcctcctcctcatgccattcctcaaattgcatccttgtccccatgggcacatttttatcacgggcatccgcacccccaaaggcaatggtcctctgtagctcattcttagatggaaacgtgacaatgaaagagttctgctcatgaacaacaggttcccaattccacttacttgaaacaacacgttgcaattgcgccaccaactgatcacccgaaagagtactaccaacaaccgtaacaagtgctgttttggaatcctttttcctggagagtggcgaatgaggtatatggtataaacccaagccagacaccgcatatccaacaacatgtgccacgggtcgaggttgcttgagcaaatggcaacggtggttgacatgatcatggccatcacatatgacacaatacaacttggtagagcacttagcaaccaagtgccccttcaaaccgcagcggctacagttcttctcctttttccctgtcctgtgcacctccctatctcccgccactaactcctggttccaagcacttgcagcagcatcagagccgacaacgaaagccagctcggtgacagcagcagctgctgcagcatcatccatccctggcacaggagcaggcgggggcctaacagccgcctggacagtctgaacaggacggtagcccctgcccgccgttgccgggtccctggacagatgaccatggtggccagcccgagcgtcgtgccatcgccggccagcgaaacccccgcgacgaggagctaagccacgggagccacgcggtcggaaaccaccccgctgccagccacggtcacgatcatcacctccgtaccctggatcgaatccaagattgcttccttgaaactcgccgccgccaccgccatggagcagaccaggatccacgccgtgacccccgccacgaccctgaccggcaacgtcgcggtctgagcaacgaccatggcctccagcaccgcggcgatccatggcaacaacggccttcgtcttcgcctcgaacaccgcctgtacgacaaccggctccagtgtcgaggatgccgcgacttgaatggccgaggcaagtgaatggacaccgcccggcggcgcgcgtgcaggagatgacaaacacctcggacgccccgcgttcgcaaacaagccgcaaagaccgtccatgaaggtgaaatgggcttttcttccctcaacgcatagtagaatgactcggcccggcccaacagcctgacagacagaccggtctccgagatcccgtgtgcctggccgcgacgcgaggaacgacgagtccgaccgtctcccagcagaaacgcctgacggcgccggagagaaagccgaggcgtgtgccgacaagacaccaggggcatggccacgaccaccatgaccatggaaagtccgcgccctggccagaacgtccgccaaagtgaggtgtggggacaccctagccggcggaagcggccctcgccatggccgccgcgccgccatcttccggacaccagtccccatccacgccgccgacgaacctgtagaaagagggctcaagcgaacgttaggcattgaatctgccactgagggcagcacaaccgaggcctcgttcgttctatagttgagcgcggtcctagtccgatccaactcagaaacgcccaagaggtgctcaccgtcaccatccccccatctttatcctcttcgtcagagcttaactcatctgctaatgcccagaatttcaaaccataggttcgagaggccagctaacggatgagcacaagctctacacgaaccaaccgaagtcccaaagccgaaatcgactccgggaacatcatgcccagccggagctggagccagcgtaagccggcggcccaccccacggcggcgcggcttgccaatgctcaggcgtaccttcgcgtccagacctccgtcggagtaggccacatcgcccgccggagcggcctgcgcgacgacggggctgccgccgccgcggggcgcccgcaccacgctagacatcttgtttatctcgttgcagatctctgatagccgccatataggtcaatcttttagactactaaaacaaacggcttaacgggagccgcataaatgtttacgaacactgttatcataattttttatgctcttatttttttgaccgtcactacagttctgcaagagtcatattatcagtacactaaaagaacatacttatatttatggtcacaaacgaattttgataacgcacgcatgcagggcacgtacgcggcatttactaattatcaagtatttttacgctcatatgatgtatatgaataaaaaaaagactacactattattcccatttttaagaaccacgaaattctctatttataaaccagcaggaaaggagctatactagcaataaaaaatgagatgatgaagttgctaacctttataaccctagaatgaatggtgaaataaactcttaacaaaaaaagtccaggcaagaatggacatgaactctttcaccccgagtgtaataaacaaagggcttcaaatgactggatggcttttttttagtgtccaaccgaaactcgtatgtgtccgtctgcggtctgccgcactagccgttggaatgcaagacttaataatgcttatatattattctcgtcaatgcttatatatatgcgagctttattggtgttcaagtagcatttcctttgtgtgtagacggacgacgaattcgagaggctactgcagcctgcaggcggccatcaaaggcagagcccaagaaaacgttcaagggcgacaggaggaaaagaatagattagtgactttttgtgtaatatttgttttaatcgatttagtatatggtatgttcgttttgatattaaatttttttgttatgatgtttttttgtgggaatgatttatttgttatgatataagaacgtcaccccataccaactaataccatcaaacatgaatgtatacatgtggcaactataaaaaagatcctctctgcatccgtctgcggcactagccgttggacccaagtcaaatgcttacattagtctaacaagtttttttaaaaaatataaatatattaaaagtttatttatatttaaaaaaatattggttaaaattatattttcaagaccgtgtcgctgttttaaacaaaaactcaaagagagtaataatcattactaaaaccaaaagctcactagcgaaacctcataagcttgtgtattttttaatgcgcacaaggggaacggttggggtggttttgaaactctctccccagagttgctgcttccaggagaaacatccatctttcagttgggtcaccagattcaccattgcaatcagcagtgtccagtttaattttccttcatagtatatttgaataagtgagtgtctaggtttcatttgatcatttctctagtctctctgtggcagtgttagctagatggatgaattcgagatgctactgcaggcggccatcaaaggcagagcccaagaactggagcagctggtgcaagacaagccggaggtgctataccaaacaactgaagcagggaacacctgcctccacatcgccgctctctgcggccacggggatttctgcagcaaggtcctcgccctccgcctgacgcaggagccgagtctcccgtcgtctctgctctccaccgccaacgtcgacggggagacgccgctgctcgtcgccgtgaagagcggccgcgtctccctggctcttgacctgctcgagcagcactcgaggcacgagctgctggacgagcaccttctgaagcgagacaggcacggatgcaacgtcctgcaccacgccatccgcaacggctacgagggcctcgcgctgcgactgatcggccggcagcctgcgctctcggagtcccgcaacgggcgcggcgagtcgcccatgttcatcgcggttctcaaaggtttcaggagcgtctacatggcgctgctgagcaacgagaggtcgcaatacagcggggccaatggctccaacgccttgcacgctgctgtcaagtacggagaccaaggtacctgctgcagatgcttgctcttcatgcatttttcccccctcttcgtctcttgcttaaaagccaaaaccgcgaaactaacttgttttttcagatttcgtagaacaacttgtggacaagcatcccgagaaggccaaagtgctggcgagacaagcggacagtaaaagggacactccaatgcatctcactgcgcatttcaacagggataggattctaacgctgatgctgagatgtgatcggtccttggggtacgagctgcacgaggaacactccacgcctcttctttccgtcgccgcagaccgaggccacgtagcttttgctcgagcgcttctggagcactgtccagatgcgccctaccacgacgagcagggcaggacatgtctccacgaagctgtagacaaggaccgggcggagtttgttgagttcatccttgacgacaactccaagctccggaaacttgtcaacatgctagatagcgttgatgacagtgctctgcatctcgcggttcagaagaacaacccgaggatggtccgtgctttgctggatcaccctgacatcgacatcaccgttgtcaaccagcgtaattgcacagcgatctggaatctgtaccatgatggggactacgtcaagactataaactgggtatgtatttctgtatgtaatgtatgagattgcttcattaattcagatggtgcctaactttttttgattgaatccatgcatatatgcagaacaaaatctgctgcctcatactgaatgcagatcgtagagctgaaactgacatctacaatttccaagaggagatcaggaacaaagtaatcgatacaacaaggaaagatgccaagtctctgatccaaacatacacaagcaacacgtccttagtggctatcctcatagcgacgattaccttcgctgcggctttcacattgccaggagggtacagcagtgatgctggaagcgaggggctcccaatcatggctaggaaggtcgcgttccaggcgttcttgatcttcgacacctcggcgatgtgcgcctccctcgtcgttgccttcatatgcgtcatagcaaggtggatggactttgagttcttgctgcactacaggtccgtcacgacgaagctcatgtggttcgcgtacatggcaaccacccttgcatttgcgactggtctgtacacggttctggaagatcgccttccttggctggccattgcgatctgcgttctgtccgtgctgctgcccgttcttacgatgctggtcggcaaatggcccatattgaagctcagaattcgatacggcaggtctgatttccttgacatggtctagacttcacggacatttcaccaaattaatccgctcattgaattgctttacaccctatcatgtgacagaaatgcattaacagattctatatgtgttacccttgacatttcaccatagccgttcatccttattcgagatattgttttgtcctttaacgtaacaaaaatgcattgacagattctacgttacccttaacatttccctatagccgctcatccttatttgagatattgtttccctctctcatgtaacaaaaattcattgacagattctaaagtttgcaatggtctaagagcatctccaagtaatgactcaaaagctccccaaaaccttgtttaaaggtgaaactcagtttttattactccaacagaactccaataactgtccacaatttttcgcgtcccagaaacgaagctaagtatcccgcaaatatgcgtgagtagatttctcccccaatcctgtgcagcggcagagtctgtgcaacatgcaacacaaataaaagtaccagggacatgcatgaaatgaaacggaccaacaatttaggcaaaatggccctacaatttttaaaatttggcctagtttcgtttttagttttttattttgagggaattgttggaggatcaccttgtttcgcacctgtaaatgtttgcgtatgtccctcataatcagtttttagggatttttttttccattttcttttggagttgctctaagaagtgatcctcaccccaaggcatctccaacacaaaccgcaactcaagaaatcgatggatcttcaaaaaaatctaagagagaagagagggatcgagagtgaaaacaaaatcgaataaaaaattgcagcacacacaaactgagcacattgatttgacaatttttttttagaaaagggaatattattaatattccagcttctgtatcggttgatacattcggctgtcaaactcacaaacatggggttccacattggaacgaaatctaacattctacaaaggtttcataaatttaagctctcaaactatgctgtcaatctatgaaaaaaagaccatccattatttgaaaagatctccatcattgttgttttaagcacacgacaaccccattttacttgaggtctgtcctcctccttctgcaacagtgtctagaaccttgtccaatgtgttcctctgaaagtgacctgcaagggagtggaaacttgtgcattatcaaaaaccacatcattacgacttaaccatatagcccaacagagggcacatgctccaacccaaatcaggctcttaagtctagaatttaaa

SEQ ID NO: 632 - protein, 731 aa, Zea mays
MSSLLLRVLLIQLAAVECLSAAIPGCLTQCGGVEIPYPFGVGTNCSRKGFRIKCINGSAGEEIPVLLPTTRYQNIRVLNLSVSPLPEARVLLPVAWQCFNATGGVTGIYSGDVDFNPEGVYRISNTQNELFVLGCDTYAFTKGVRVHNVNARFPYRYFTGCITVSVDDKDPRDGACAGLGCCRVDIPPGITDTSMTFSSTWTRANQTFCPCDYAFIVEKGNYTFKASDLVSHTPDNRLPLDWWTMPLRLDWAIRDNNGDSMTSISCAQAPNEPDYGCRSKHSECTNSTNGPGYFCKCAHGYDGNPYVQSDGECTNINECQDPKSHNCSSGSKCIDTDGGYYCQCNFFRRGQQCDPLIPMAAVALLTTFAAVVLGCVAIVLLQTLNNRKRFNRNGGKLLNAQGITTYTKRELKKITNGYSKRLGGGHFGNVYEGTIVDGRKVAVKCPLRTRVSSHRCHWKNLIRPRRVPLPQQRVEEDGSFMNEIRFQFEVSRHKNLVQLLGCCLETDIPILVFEFVANGSLEDILHSAKKPCTLSLPERLDIAIGSAEAIAYMHSLDNQKRVHGDIKPSNILLDDDLNPKVSDFGSSKLLAIHSYYVRAVAADIGYMDPLYMKTEHFTLECDVYSFGVVLLELITRRRASWYEQDHQGNKILPIEFVKCFKDHGSGCAMYDSRLDFSAGEDAQSRCNKRCLDMIGMLAVRCLKEDKRERPTMAEVVEELKRVKVLLLGTHI

SEQ ID NO: 633 - DNA, 3876 bp, Zea mays
ttcggatgctgaatctgtacaccatgccctgaaaaccgcacttgtgtagtttgtgtgactggtacagtagaagatagaaggggcgccggggacccatttaccatactctgatgactgcaagtacgttcatttagagtgaagtaagctacacagctcaccagttggtccagacgtccagtgagcgtacatgttttgaatgaggggcatgtggagagcacatagacagttgagtccggcactctcctggatcggaattgaattttatttgcagcataatcatgtgtggttctccaactgaaccatagcctcgttcttctcacccccttcaaaaaaaacgaggggctggctggctggctggtagtagtagtaacctgcttgttagctggactggtgatttcaaaccgtgatgggtgggtgcacatgtcctgatgtcactcgaatcgggttctgttttgccgcgtcgcctttgcacgccgccgtgatgtgccgctgccaaccttggggggatttcgaacggggacgacgaaccagatccaccgcgcagcgtcacccagctagcctgctgcctgctggactggaaccgggggaagcctccaaggcgaaggcagcagcaggaacagtagaagcttggggatgtggattactagactattattatttattagactagactagagtagtcatggggatcaacgacaccccttgagatctcccacatgcaaacgcgctcgattaacctttttttactactttcccaaacaaaagtcgccctcccgaccaactatatcaaaatcaaatcaaatgctttcaaaccaatcgaatcaccaccgggcggtccttgcagcgcattcatttcaaatcgctttccccaaactacccctgccttccctcaatgatctagtctacaggtgtgggtttcccgtcatttcgccgctaaatcccagtcacctaaaccccacgcccctatcgctcccctccttccccttctccgcagctcatcctccccttgtctgcgacccagggaatggcagcactgtcattctagtcactcaacaaccaccaccacctgcacccccgctcgctccgggcaatggcggcggttctggcggtcctggtgtcggcggtggccgccacgtccatcacggccgcggcgctcaacacggacggtctcgcgctgctggcgctcaagttcgccgtctcagacgacccgggcggcgcgctgtccacgtggcgggacgcggacgccgacccctgcgcctggttcggcgtcacatgctccaccgccgccggccgcgtctccgccgtcgagctcgccaacgcctcgctggccgggtacctcccgtcggagctctcgctgctgtcggagctgcaggcgctgtcgctgccctacaaccggctctcggggcagatcccggcggccgtggccgcgctgcagcggctggccacgctcgacctcgcgcacaacctgctgtcgggcccggtcccgcccggggtggcgcgcctcgtctcgctgcagcgcctcgacctctcctccaaccagctcaacggcacgatccccgccgcgctggccgcgctcccgcgcctggccggcgtgctcaacctcagctacaaccacttcacgggcgccgtcccgcccgagctcggcgccatccccgtcgccgtcagcctcgacctccgcgggaacgacctggagggggagatcccgcaggtcggctcgctcgtcaaccagggccccaccgcgttcgacggcaacccgcgcctgtgcggcttcccgctcaaggtccagtgcgcgggggccgccggggcggacgacgacccgaggatcccgaactccaacggccccaccgaccctggcgctgcggcggaggtcgggaggaggggaggcccgaggcagccgcggcggcggcgctcgtcgccggcggtcccggtcctcgcggccgtcatcgtcgtcgccctcgtcgccggcgtggttctgcagtggcagtgccggcggcggtgcgccgccgcggccggggacgaggggaaggagtccggcaaggagaagggcggcggcgcggtgacgctcgccggcagcgaggaccgccgcagcggcggggaggaaggggaggtgttcgtggccgtcgacgacggcttcgggatggagctggaggagctgctccgggcctccgcctacgtcgtcggcaagagccgcggcggcatcgtgtaccgggtcgtccccggccgcggccccgccgtcgccgtccgccgcctcagcgagcccgacgacggcgacagcgatggctccggttctggctccggctggcgccgccgccgcgcgttcgaggccgaggctgccgccatcggccgcgcgcgccaccctaacgtcgcccgcctccgcgcctactactacgcccccgacgagaagctgctcatctacgactacctccccagcggctccctccactccgctctccacggtaacagatctgtgttccgctagcgatagcaatgagcaaggataatacatagattaacaccggcaagagccgttccgttggttatctgtcccaggtggcccgacggcgtcgccgacgccattgccgtggtccgtgcgtctgtccatcgtgcagggcgcggcgcgcgggctggcgtatctgcacgagtgcagcccgcggcggtacgtgcacggctgcatcaagtcgtccaagatcctgctggacgacgagctccgcgcgcacgtgtccgggttcgggctcgcccgcctggtcgccggcgcgcacaaggccgccggcggcgggcactccaagaagctcggcagcgcggcatgcgcgctccgaggcggtggcgcggcgtcgtacgtggccccggagctgcgcgcgcccggcggcgcccccgccgcggccgccacgcagaagggggacgtgttcgcgttcggcgtcgtgctgctggaggccgtgaccgggcgcgagcccacggagggggagggcggcgtggacctggaggcctgggtgcgccgcgcgttcaaggaggagcggccgctgtcggaggtggtcgaccccacgctgctcggcgaggtgcacgccaagaagcaggtcctggccgtcttccacgtcgcgctcgggtgcacggagcccgaccccgagatgcgcccgcgcatgcgcgccgtcgccgagagcctcgaccggatcggctgacttccagcgcgacggcgtccggccggccgccggttactgatcatcaactacgtaggtgcaatccaacgcataaaagagactcgcagtcctgttcatgtagattagcgcagttaagcattgtggatttcagagacggtaaacgcaggtaaaaacaatcatcatccgctccatctgtgaatgacgaaggtgaatcactcgacgtagcaggctataggctagcagccgtgctaatattttgtggcaccccttgatccattccaaagcgaactctgttgggagttttctatcgttttgccactgcctacaactgtgcggcgctttgcccaaaagcttgcgatgcgttccttggggacctgggactctgggaggcagagagagcagacaggcttttggccctaggctgtgcggttcacctttggcttggtcgaattgactctgaaaagatgcgacaatgacacaaggtgtgctgcacccttctggtcagtgcactgtcctcttgcctgtgctgctgtgcagtgcaggagcagcatgcttttgcaagtttgcatgcgtaggagtaagtgacaaacaaccaacaggacgccagcgtcaagaggtgtcgattggtcattggagaagggctgttcggatggagattttgtttgaatttcttgatgcaaaaccattgcctgaaacgtgtagcaatcatgctcatgccgaacgt

SEQ ID NO: 634 - protein, 362 aa, Zea mays
MLHRRRPRLRRRARQRLAGRVPPVGALAAVGAAGAVAALQPALGADPGGRGRAAAAGHARPRAQPAVGPGPARGGAPRLAAAPRPLLQPAQRHDPRRAGRAPAPGRRAQPQLQPLHGRRPARARRHPRRRQPRPPRERPGGGDPAGRLARQPGPHRVRRQPAPVRLPAQGPVRGGRRGGRRPEDPELQRPHRPWRCGGGREEGRPEAAAAAALVAGGPGPRGRHRRRPRRRRGSAVAVPAAVRRRGRGRGEGVRQGEGRRRGDARRQRGPPQRRGGRGGVRGRRRRLRDGAGGAAPGLRLRRRQEPRRHRVPGRPRPRPRRRRPPPQRARRRRQRWLRFWLRLAPPPRVRGRGCRHRPRAPP

SEQ ID NO: 635 - DNA, 6605 bp, Zea mays
ggaggatccgttcgcggaaaagtgtggagggggccggagctgggaacgagcgggagcgtgcgggagcgtgcgagatggacaaagacgggaacgggagcgagcgcacaacggctacggcgagggctaggtcgccggagaagagaatggattgagccgtacgcggggggccaggaaagtggaaaaagcgcagtcgggcgcggggaagtgaaaaggcacaatatcggttccgctgcgtcggttcggatgtgtggatcggttgggtcggaccatgtgcacctgggcgcctgggtgcattctctatattgaatgcacccaggtataatatataataacagtatatatatatagggcaagaggagaaacaaaaatggatgcaacaattgacagtacctcaatgcaattctattcggtgaggacatttcttctaccgataatgaactcataaaaaaacggacagctatttttttcttctacttaaaaaagaaatcaggaggtcgcactaagcctcttttttttcaaaaaaaaagaacattacttaggtagtaatccagaaacagtaaataacgacccaaacccaaatgctaaaagctctccggcggcggctgctttctggaggaggggaagagacggtttgggcttcggccctttttattttttttggcgcttagagcaactccaagagattagctaaaaagactagccaaatttactgatttagctaatctctaaaatagattttagagaaaaagtgtaggctaatccaacagactcggtaaacctacggactgaatagagagtgaagcaggctatccaaaattggagagcgaagatggagaaatagagagccactaaatttgaagagtcatttacagagtctattggatacaattttcttttaatattagctaaatttacctttacaaaaccatatatctagtctcttggagttgctctaactttttaggcctgcagactgaccaccaacgcagtgaccagtggcggccactctaccaccaacggtttggtcttcgtctgtacacccgaacctggcatattcatacggtgactgcaaggtgagccacaactcagaggcaagcagagtcagcaaagatatatgaaagggaggagaggggttgaacagattattactctcagaaaccagccccttctaccctaccgttcttcctcctatacaatacaacaactactctcttgcgttgtactcggagccaggatcagatggatgcccttgctttgctgcctatcctgatctcttctcctctcaggatgtaggcagatcgagtaatcagtggctcacattttgacaagacactcaaggttcgtctcgatctccaccctgcttccatccccctttgtttctgtatcagagagaaataatggcttcctagttgctgctacccatctatgcggtagccggtaggcaaacatgcgaatacttcctcagcaaatcctatccagccactccaaaaagtatccacagattccaaagacttttagcaaatccttaaggtatagtagcagatctgacccagcgttgactttctcagcaagcctcaaataagaactagctgatcagactttcaattagctttttttttgttggcagatcatcagacttcaaaagaactagctgtcccttttgcattacatcttatagaccagttacagtttgctgctcggtaacagatttcttctattcatgtagggagcggcactgatgctataaggtgagccttgaccttattccaagtctgatcgaataagaagggatggcagagattgctgttcttctcgtcctgaagaagattgccatagctctggcaggagagaccctaagttttgctaaaccattgcttgcaaagaagtctgagtcggtggcagcactcccagatgacatgaaactgattagtaatgagctcgagcttatccgggcgtttctcaaggaaatcggcaggaaaggctggaaaagcgaagtgatagaaacatggatagggcaggtccgaagactggcttatgatatggaagacactgtagaccattttatttacgttgttggtacacacgatcagatgggatcatgctgggattacatgaagaagatagccaagaagcctcggcgtctggtttcactagatgaaattgctagtgagattaagaagataaagcaagagcttaaacaactctcggaaagtagagaccgctggactaaacccttggatggcgggagtggtatacctgcaggaagctatgaaactgaaaaggaaatgtatcttcctggacatgattacacaatcagcgacgaggagcttgcaggaattgatgaaaataagcaaaccttgattagttcattaaaatttgaagatccatcacttcggatcattgctgtctggggtatgggtggcgttggaaaaagcactcttgtaaataatgtgtacaaaaatgaaggatccaactttgactgccgtgcatgggtttctatctctcagtcatatagactagaagatatatggaagaaaatgctgacagatctcatcgggaaagataagatagaatttgatcttggaacaatggatagtgcagaactaagagagcaattgacaaaaactctagacaaaaggcagtacctgatcatactggatgatgtctggatggctaatgttttttttaaaattaaagaagttcttgtagataatggccttggaagcagagtaataatcacaacaagaattgaggaggtagcttcactagctaagggtagttgtaagatcaaagtagaacctctgggtgtcgatgattcctggcatgtattttgtaggaaggcatttctgaaagatgaaaaccatatctgccctccagagttgcgtcagtgtggtataaacattgtggagaaatgtgatggtttgccattagcccttgtggcaataggaagcatattgtcgctgagaccgaagaatgttgacgagtggaagctattttatgaccagcttatctgggagctacacaacaatgagaaccttaatcgcgtggagaaaattatgaatctaagttataaatacttaccagactatttgaagaactgcttcctgtattgtgctatgtttccagaagactatctaatacacagaaagagattgattagattgtggatagctgaaggatttattgaacaaaaaggggcatgcagcttagaagacactgctgaaagttatcttaaagaacttatacgacggagcatgcttcacgttgcagagaggaactgctttggtaggattaaatgtattcgaatgcatgatcttgtgcgtgaacttgccattttccaatctaaaagagagggtttcagtacaacttatggtggaaataatgaagcagtgctagtgggatcatattctcgacgagtggctgtgctccaatgcagcaagggcattccatcaaccattgatccatccaggcttcgcaccttaattacattcgacaccagcagagcattatctgtgtggtattcttctatttcctccaaaccaaagtaccttgcagtattagacttatcaagcttgcctattgagactattccaaattcaattggagagcttttcaaccttaggcttttatgcctcaataaaaccaaagtgaaagagctccctaaatctattacaaaacttcaaaacctacagacaatgagtcttgagaatggggagttagtgaagttcccacaagggttttcaaaactgaagaaattgcgacatcttatggtttcacggttgcaagatgtaactttcagcggtttcaaaagttgggaagctgtggagccatttaagggcttgtggactttgattgaactgcaaactctgtatgccattacagcaagtgaagtattagttgcaaaacttggaaatttatcccagctgaggcggcttataatttgtgatgtaaggagtaacttatgtgcacagttgtgtggctctttgtcaaagttgtgccagctgtcacgattaacgataagagcatgcaatgaagatgaagtgctacagctggatcatttgacatttccaaatcctcttcaaacccttagtttagatggacgactgtcagaaggaactttcaaatctccctttttcttaaatcatggaaatgggcttcttaggctaatgttgttttacagtcagctttcagaaaatccagtaccacacctctctgaattgtcaaacttgactaggttatcccttataaaggcatacaccggccaagaattatacttccaagcaggttggttcctgaatttaaaagaactttacttgaagaatttgtcccggctcaatcaaatagacatacaggagggagctttggccagccttgaacgtataacaatgaaacacctcccggagctacgggaggttccagtcggtttcagatttctcaagtccctaaaaacaatatttttttccgatatgcatcctgagtttgaaagcagctttcaaaaggaaatgtagatcatatcccgtacatatgcaggacaacaacataaggcaagtgaaagcttctcaacctacagcttaaactcttttcatgtctttactaaagcttttaagctttatttgtcgtcaaatgactttaggtaccacttaactattttcaaatctagatgttttcttgtgtagggctacaagtgtaaagtcctgttgcaataatgaagattcccctgaataactactccctacagtcacaaaagtatgtttagataagatttggtcaaacattaaaaactacaaacatcaatacctttgaagtctttttgtttggtgacatatatgataacttttttagatagcaaaacatggatgaaatatgtgcagatttgtgactaatggtttatgcaactgtggtaactaaaatgtggctctgttagcaacttagatcctagggggctgagcatctaggtctttgtcagagatgcttatgactgcttgccgtaatgtaatgactggttctggagtggccacttaggatatactgtgcaacaacaagactatggatctggtcttaactaattactttgagcttgtctcgtctgttagcagcttgcaagacgctaagcaaattggtcactaatcactatgcaaaaaatcacaactcagcaccatatcaaagcattgacaattggtatcacctttttgcagtatggtttgtttgtatgtctacgtgtaccttctgtcctctcccaaaaatagggcgggttgcattggcgaaaagttcatgatgggtgttttgagcttgggcaattactgtggagaggaaatgcagcactaggatccaagctttcgagcagaaagcagcgctgaagctgaagggcatgtcatgtcattcaggtacctagtaggatccaaaccttcgagcagaaagcagcacaggcactggcaccaaagaggaaccatagccgccaggcaacatcagtcatcaggaccggttaataatgtttatgtgtgataatgttgtttcaataattatttggaaccatttcgaactccgaatacttgagagtctgtacgaagcatttggcaataaatactatttcagagtaattataggatactataatttatcattccaactgcagccaagctgctgcagctgcaatacacaaaaataaaatatcttagaagctacagtcgtaaccgaactaaagccacaggctgcagctgcaatacacaaagataaaatatcttagaagccacagtcgtaaccgaactaaagccacaacgaacatgctgacgccctcccgttaccaagttaaatgcaattagcactttgcttgtttgctctcactctgagttgatctttaatgccatctatattgtctgagattagtcttcttgttatcgttatctcccttgtgcttgttattattgcagttcttttgtctggcctaatagatagattgatcaagtgaaagttatagatctatggctattaatttgtctggttatggatctccaatggcatctgtattatttgggactagtcttcattatctcttctatttctagtatcattatgattttttcccctggccaaggaattagattggtagactgaaagttatatacctgaggctgattaatttcgttccatttctttctgaaaatattcggtgtttcttttttaagttttcaagctttctttttatattgtagtatgtatattcttgtcatctctgtattttattacgcgtaatgtttgacagtttgaacgagctccctatgtttaagtacaggtcctgcccctgtgcacctatattgtacctctaagtgcagattacatatactaagaaaccaacaagatgagaaacacgcacaccaatttcggaggcaattacagagacagatttaatactgacatggtactcagcttgctacttaatattttaattggctagtgaaagccccaaacagttccgacctctctgcaacagccagggaaagaagatgtaatacccactttgtaaaagaaaatttaagagtagaaattatattgctttgcatatatgagtgtcatccctatttatcatttcatgtggacacctcatttac

SEQ ID NO: 636 - protein, 905 aa, Zea mays
MAEIAVLLVLKKIAIALAGETLSFAKPLLAKKSESVAALPDDMKLISNELELIRAFLKEIGRKGWKSEVIETWIGQVRRLAYDMEDTVDHFIYVVGTHDQMGSCWDYMKKIAKKPRRLVSLDEIASEIKKIKQELKQLSESRDRWTKPLDGGSGIPAGSYETEKEMYLPGHDYTISDEELAGIDENKQTLISSLKFEDPSLRIIAVWGMGGVGKSTLVNNVYKNEGSNFDCRAWVSISQSYRLEDIWKKMLTDLIGKDKIEFDLGTMDSAELREQLTKTLDKRQYLIILDDVWMANVFFKIKEVLVDNGLGSRVIITTRIEEVASLAKGSCKIKVEPLGVDDSWHVFCRKAFLKDENHICPPELRQCGINIVEKCDGLPLALVAIGSILSLRPKNVDEWKLFYDQLIWELHNNENLNRVEKIMNLSYKYLPDYLKNCFLYCAMFPEDYLIHRKRLIRLWIAEGFIEQKGACSLEDTAESYLKELIRRSMLHVAERNCFGRIKCIRMHDLVRELAIFQSKREGFSTTYGGNNEAVLVGSYSRRVAVLQCSKGIPSTIDPSRLRTLITFDTSRALSVWYSSISSKPKYLAVLDLSSLPIETIPNSIGELFNLRLLCLNKTKVKELPKSITKLQNLQTMSLENGELVKFPQGFSKLKKLRHLMVSRLQDVTFSGFKSWEAVEPFKGLWTLIELQTLYAITASEVLVAKLGNLSQLRRLIICDVRSNLCAQLCGSLSKLCQLSRLTIRACNEDEVLQLDHLTFPNPLQTLSLDGRLSEGTFKSPFFLNHGNGLLRLMLFYSQLSENPVPHLSELSNLTRLSLIKAYTGQELYFQAGWFLNLKELYLKNLSRLNQIDIQEGALASLERITMKHLPELREVPVGFRFLKSLKTIFFSDMHPEFESSFQKEM

SEQ ID NO: 637 - DNA, 10652 bp, Zea mays
accctccggctacaacatcacattcctctacaattgcaagaagaacattagagcatctccagcaggtcgtgtaaatagtcgtgcaaaatacgattttgtactatagattacactgtttgcagtgtaaagatagagagttggataaggagtctactggacatattaccctgtcctctaccgtggaactgagtgggtacccacagcaacaagaagatagaagtaggtcgtacgtgttgtcgggtggtgggatcatgtgtgctgaggcgtatgtatacatgtccaaataggcaggtcgggccgactcggcctgagcccgactaggctcgacacggattaggatcatgctggcttgacccagattagcaagcaggtcatgtcgtgcctgcccacgggtctcgagcgaggcccagacacgacacactaaggtattaaccgtgccgaaccgactcacggcccgacaggccaaacatgtctataatagtatatgacgtttaaatgtaaaaaatatgttaaaatatacataacgaaggtttaaaccatatttattagctctaaacacctatttacacccacgtaaccaacaaaaaaaatatgtttactgtattttatactatatatattcaagtataatgtatgtatttgtattaaaaataggaacacaattaaaaatgggtcgtggcgtgtttagcctctcgtgccgcgcgtagactcagacacaacctagtcaccgggccgggccatccagtgcctgagtttcggaccgcccgacccggtacaagcacgggtgcgagggcgtggtggtggcgccgccggtgctggagagttatttatgattatgatcatctcgtcgcgcggcttcgccactttggtatcccgcagctcgtcatcgccagattggtattgtcgtcatgcaccactcgtcagattgggttcgttttcatctaataggcttctaacagcgcgcatagcttcatacgactgactaatttacccttctcttttcccagtccggggaaataaactgatgagcaatatgtacaagagaaaagaggatcctaattatcattaacttcatccccaacccacgttagcacgccgcccagccgccctccttgagcagcccgcgcacggtgctggctagcgtgggctgcgtcgccgcgtcggcctccatcacctgcagccgtgtcttcacggtgtccagcggcatggtcaccagtgccgcggtgcccccggccagggccgtgctcgcgccctgcacggccatcaggcaggcgcagctctcggagcgctcggtccccacggggccggccgccgccggatctcctccaccgctgcggccgccgccgcagcgccgctctcctcctccatgtctacggcaccgaagctagaatgaaagggcagcaatgtcttttaccgttttacattcgttgtttatctggcttcatcggtaacgaatccaatctggcgagttatgcacgacggcaataccaatctaacgatgacgagccgcaggatacaaaagaggcaaagcctcgcgacgagatgatcataatcataaataactcggtgctggatgtacacaagaagggggaagagaagcccgggcaccaccggcggtccgcctccggaacggatcgctctgtcggttgctgcagggcgggttcgagctgaactacgacactcactccgagcagtgcgtccgatgctagggctccggcggatggtgtggctacaagcgcgaggagaggcccgccggcgggatgacattcgcctgtttctgcgacggcggccagaccacgggccgatgcggtgccggtatgtctctgttttttttcttcgaacaaggtttggcatgtgttctaccgtttcaactagtaaatgattacattgagctaggcagctagccacacattttcttgaatgattttcttcgatgaacctgctgttttcttttatgacgtgaacaaccgggcctgcaagctgccacatacctaggggctagggagactagttcgtgaccttctttacacgtcttctctactttgtgacgttcaaccagagtccagagatgtaattctctgcgaaattgcgaaaacaggactagttggaggcttggagctaacaacgcggcttgatgagggtgaacccagccccacctcgtctaccacgtcttctcctcggcatggctgctcacctaccacgtctccccgtcctcctcctcgtcctcctcgctgcccatgtcgtctccacctccacccgtgccgagcctcctcttccgagcacttacaacgtctccatgttctcggaatcgttctggtgcggcggaatcgagttggaatggaatcggacatgggaggatcagtgtggccagtgcgagggattgggctccggcggacggtgcgcctacagccagaagagagaattcctgggctgcttgtgcagcggagggaaggtgggcaacccgttctgcaaaccatcgacatcgagtaagtcctgaaccgagcctcccttgttttgttttttttcattttttgcaatcaccagagcatgcatcggttgcgtcagtatcttgcgactagggccctgtttggtacagctgctgcttgttgaaaaagcagcttatctgataagctggtgaaaagcagcttctgcttgttggctgcttttagtgtattctgagaagcagctgaactgataagctgctgcagaagctaactgtttggcagaccttctgcttaaatttatgaagaagctgaaaataagctgtgccaaacagggcctagagatgacaatgggtaaaaacccgctgggtattacttgcccaaacccatacccgcgaagaaaaattacgcccgctaaaaaacccatacccatggcgggtataaaattttgcccaaacccatacccatgcgggtttcgggtacccaacgggtttcccatacccactaacatcaacataaaaaataattcatcatgtaaatgacaatcaatacattaataagctagcataaaaggaacaaatgataactaattttagcctaaaatttgttacatgaagtttatttcaattagaacatatttaattaataatattatgagacatatttataaggaatgttgattttaaggcgggttttaaaaactcatgggtttgcgggtatgagtagtggaagaacaaacccatgcccatgtacccgttgggttttcatttgaacccattaacaaacccatgggtagagaaattgaccaaaacccataccctaatagagcaaaaacccaccgggtttcgggtagcgggtacccattgacatctctacttgcgactctcgttctgcttttgcaccaaatccgtgttttttcatttcgtgatcgagattaatcgggcatagagatgacaatgggtatccaaaactcgaaatccgatgagttttttaccccattaaggtacaagtttaaatcaatttttatattcatgggtttgttaatagtcataaatctatatccaacatatttatggataagggtttgtttctacggtaatcaaaaccgtgaacccatgggttttttaaacccgaccaaacctagtgcatattgtcattttattttataaacgaacaacaaaattgttatatccctatttacttcctattttttatcgattggtgaatgtataagtagttggtgagagtgtttcttgcttgttattatagtttttactagcgttatatatgtggtggatagataatttagtgcaagttcacttgattatacaacttattatttgtattcattctctctactaataatttttatatcaaatcataaacgctgtgtttatcatataaattttggaccatgatctcattaatcatgatgatagttattgattatgagaagaacaagcatattggagataaaacccgtgggtaacccgttaaccgatggatacgggtttgagcaaaatttcaaacccatcatggatacagggttttttaataaatatagatatgttttcacgggtacgaatttgagatgacaaaattcaacgggtttgtatctgttaccatctctatccggcggctcttaccgtcatccacgagaagaggtcttatcgtgcctcttcccgtgtcgcctgcttcgcgttgccgaacggagacgtttggtagcgttggccggctgcccggctctagcagtcgggtctctttttccaatgctgttagatttttgttccgtataagccatgttttagtaatttatttagtccatccgaatccgaagacgtgtttgctgggttggagacttggagttgctagtcatgatatgctttttactcggtttgatttcagcccagctaggttatatttggatactatattatttatcacaatacacatggtttgaaaaagattaggatgtaaattagtttaatttatatctcaatttctctcaatctatttgtattaggatgaatactagagtattaaaaaaccctaattttggatgcatttccctacagttacacatggccactgttgtgtgtgggggtaggccgatcctactcgtcgttcgagagcaagcaaagatactgaacaagattagagggactaaaagttccttactatttaaaattgaataataaaatgatttaatccggttccatatctttactctgaacaaaccctcaatgatcatatatctcggaggatccggccggctgttctttatttatgaagtgatgactgctgaccgcttatagaatatatattttaaagcaaaatttcttctacagcagtaaaaggactagacgaaacaatgatgcatttctctaagaaagaaaaagtagaattatcaagtggagagccaagaccaagagccttgcttctatgggcgtcattgcgtcaacaatgataagtctgtttggtttgtttctctcgtcaacctggctgtgttctggagatgcgaccaatctgctcgtatctggtgagcctggcccagagtgctttaaggatcgtgcgagcctagatccaaatctatatacagccaaccaaacacagagctcgcacgcgcatagcctggctcacagcaaccaaacaacagctacccgcatcctgtgatgcaagcatgcgcagatacaggcaaccaaacagaccgatacgagccgcgagtgaaacatcccccagctggtctgtactgtctgtcaccacccaccgagtaatcataccactggctacgctattaggcttaaggctgcacgaaatactcttcattaacgagccagctcgtgagttaaacgatctatcacataacgaaactatatgtatattatttacataaaaaataataaatatgatatatatatatatatatatggtgtatatgacctatgaattaaactaatgattgataaactgtgtctatatgttaaattgctctatgcaaatataactatgggttaaactggtaaacatgtgtgtgaattgatgagtgaggagttgtgtgtaatttgatgttatattgatgtgatatgtgaaactatgggtataattactattttctataattaaatttatttaaaattaactagaaattgattatatatatatatatatatattatttttctgcgctagctcgtgagctaaacgagcaagctcgagctcgcaaacgagccaaaccgatctggctctgtaactcgttagcttaacgagccgagccaactcgttagcttaatgagacagctcgaactcggacgagccgaactgagctagcacgatatccatccctaattaggttcgtaccagtgtagcatatccctctcgcctttgtcacatccagtgatggcaatgggcctcgatttctcacatggaattcctctattaagggatggggatgtggaagtttctcccacagggaaaaaattctcctccgacgggtaaacggggacgacactttccatccccgttcctcgttggtacctgttaaacttacatatgatgatgttttcatgtaaaagttaatgataaaaataaataattaacttgtcaagagatcgcttttttacaaatatgttcattctgatttatatattttttccttacacctgacaatgtgttgtattaataacaaaagaagtatttgcttataatttaagtggggacggggatccccgacatggatttgtatctatggggaacgaggacggggaagaaatgtccttacaaactttcgtggggatcctcgcaagaatctttttcatcgtggggacgggatgggaagttaaaacccgatggagaattccccgttgccatccctagtcacgtcaactctcgactccactattgtccctgatgcacaatctgtagtagactataacctcagcctatagcacatcagcttttctatttcagaattaagtaattcacgcagttttatttcaacgctcagaaattacacaacataatatttttattgaattaaaaattacaaagttcataataattaaaataaaattatattataattaaaacatacataaatctaatcagagacctcgatctcgtcctcatcttccaccacctttttccattatgctttcggttcctcttcttcgtcatcaacaggaccacatccttctttgaacatgtttatggcttggcatgggttcatctttcagctaggtccatatctctggttgatcggccctttagaatattccattgctttaaaagcttggtcttcactaatccaccccacaagttcttcattttaaattcttcacttgttgaccgttgctcgtggcttccttccctttccccttccccttcgccttcatctttcgcgcagctgcctttgccctatcacgtcccattggtcggggcacttccttctttgtatctttagtgcctccaaaactatattcaccagagactctgagtcgggttatcttattcgtagtcccattttatcttagaaccttgccattgctgcctccatgaccattgcctcgtctgctccactctgacgcaacttttcttcttggaggtattatccaatgaacttggtcacctcccggttgtaggtgtcctaatgagttttaagttgcttggcggtttgaggacgtcgaggttcggaagtggagctatatgttgccgctatttgaccccaaaaacttgatccagacttattgttgatagagatggaatcattagaacgcatattccaagaattaacctacaataaaacctataatataagtaaactacaaatatcaatattaaataaatgagaaatgattcactcaccaactttttctcatcggcaatcatctagtgtagtctttttggacgctttttcttcggcccaggattttcctcaccttggttttcaaatccaacatagacgggacatgtaggtggaattggaggatgtgctccatacagaaggtggagcatatggaggaggggcgtatggaggtactgagaaagattaattagactatatttacaatttctaactagcatctaaacattaaatgttatagggattaaattttagttagtgaccttaggcttttagagttgagttagtcacagcttggtttgttacttgtttgttctctcttgcgttgatttgggacctccctataatgttttatcaccttctaaaatacgcagctgtcttgcgtattgcaggcgtgtgttttcctatatttttgaggctcaattattaaggaaattattctcagcgagcatataaccgttttcgaggtaaaatgaagtaaaagcatatgggcctgcctgttcgcataagtacaccctccgtctaaaaagaataaaaatctcatttcttgatgagtcaaaaagttcaaatttaagaaaatatatgttatgacacgaatatttataatgcgtaataagtactgctaaattaattttaaaataaaattttcataataaacctatttgaagatacaagtattggtactatttctaataaatctaatcaaactggtgttatatcttttgtaacaaatttgtgctttatgtttctggtgacgtgaatcagcttaatcttgctcaaatctaacattgtcttttgttcgttggcatacaggatcaaaaagaaaagaagcagcacctattgttggtaagagcctatagtcaatacacatgttcatttcgtctaaaagagcagaagaaaagcatgtgatgaattattgccatgtcatgtttaaaatacagaattctcaaaaacaaaaaaaaacttggaatccactaaccactgatagcattgtagaaaatttcatcctcccgttgggcagtacactgatgagtttacatgctgactagtggtgcgcatttgttctttgccaattgagtttttagaatgctttgcagctgaattcacatgtgattttttttgtgatgcaggtgctgttgccgttgcattcctgtgtctagtcattctcacatccttcttggcttgtagatatggtttgcttcccttcaaatcgaagaacaaaccagggacaaggattgagtccttcctacagaagaacgagagcatacatccgaaaagatacacctacgcggacgtgaaaagaatgacaaaatccttcgctgtgaagctaggccaaggtgggtttggtgctgtatacaaaggcagcctccacgatggccgacaggtagcagtcaagatgctcaaggacacccaaggtgacggcgaggaattcatgaacgaggtggctagcatcagcaggacttctcatgtcaacgtcgtgacacttctagggttttgcttgcaagggtcgaaaagagcactgatctacgagtacatgcccaatggttcgctcgaaaggtatgccttcaccggtgacatgaacagtgagaatttgctaacctgggaaagactatttgacatagcaattggcacggccagagggctcgaatacctacaccggggatgcaacactcggatcgtgcattttgacatcaagccacacaacatcctgttagaccaggatttctgccctaagatctctgactttggactggccaagctatgtctgaacaaagagagcgctatctccattgttggcgcaagagggacgatagggtatatcgccccggaggtctactcaaagcaatttggaacaataagcagcaagtctgatgtctatagctatgggatgatggtccttgagatggttggagcaagggacaggaatacaagcgcagatagtgaccatagcagccaatatttccctcagtggctttatgagcatttggacgactattgtgttggtgcttccgagattaatggtgaaaccacagagctcgtgaggaagatgatagttgtaggtctgtggtgcatacaagtgattccgactgatcgaccaacaatgacgagagtcgtcgagatgttggaagggagcacaagtaatctagagttgccacccagagttcttttgagctgacaaagcgtagatatttttcctatcaaatgttgcttccaggtcacacaaatgcaaaatatttgtggagacgagtgcccattaacctcatacaatgtatctgtatgacaaaagtcccacgactcactggacgcggaaatgtcgcttgactacgtcaattttctaaaaagattggcagcaattaatggaggcttatagcggtaactttggtttgcattagtcctaggaatagggttgaatatcgatccaactcgacgtggcttggtcgagctcaagctagctctgctcagctcattaaagaatccagctagagaatcaactcaggtcatttacgagtttgagctggctcgtttaagtcgtaaatcacaacaaaagacaatatatatatatatatatatataatataatcaatactagttaattctagactagtttaacactagaaaagagtaataatactcataatttcacatacaatgtcaatccaacaccaaattaatacacttcatcacttattagttcatccaaccaagtgtaggctttgatttactaacaaatggttgctcgttcgagctagcgagcttgcttgttaacaaaccgagttgagatgctagcttaacttgtgacaaaattaaaacgagccgagtcgaaacaagttgagttcatgacgagttgagcaagctcacaatccacgagtaattttttccagtcctacctaagactaaagtttagtcctagaactaaattttagtctctatctgtttggttctataaactaaacaggttcagaacaaataaaatacactatagaaaaactgaaatacccttctatgattaaggcgtcactaagcgagagcaataaatgaagggtagagagagaaataaatatgctttagtctcttttagctaccatttgagagagtaaagactaaaatgaaaggtcccttgtaggctttggtgttttggatgacaacacaattaaaggtctaattaagatgttaagtgttgagcaggtacttagtgaaaagcttccaaggctcaacacatggagacaagagtgatataccatatataagctgagttggatatggtctatggatatcaggagtcaaagtgaaagattgtcattgatcaagaatttggatacaagaagcctacttgattaatttttctattattta

SEQ ID NO: 638 - protein, 476 aa, Zea mays
MRVNPAPPRLPRLLLGMAAHLPRLPVLLLVLLAAHVVSTSTRAEPPLPSTYNVSMFSESFWCGGIELEWNRTWEDQCGQCEGLGSGGRCAYSQKREFLGCLCSGGKVGNPFCKPSTSRSKRKEAAPIVGAVAVAFLCLVILTSFLACRYGLLPFKSKNKPGTRIESFLQKNESIHPKRYTYADVKRMTKSFAVKLGQGGFGAVYKGSLHDGRQVAVKMLKDTQGDGEEFMNEVASISRTSHVNVVTLLGFCLQGSKRALIYEYMPNGSLERYAFTGDMNSENLLTWERLFDIAIGTARGLEYLHRGCNTRIVHFDIKPHNILLDQDFCPKISDFGLAKLCLNKESAISIVGARGTIGYIAPEVYSKQFGTISSKSDVYSYGMMVLEMVGARDRNTSADSDHSSQYFPQWLYEHLDDYCVGASEINGETTELVRKMIVVGLWCIQVIPTDRPTMTRVVEMLEGSTSNLELPPRVLLS

SEQ ID NO: 639 - DNA, 10479 bp, Zea mays
tttcgttctctgtatcatctccatctccaacaatagcccctaaattcgttcatctacatgtacagtgtcaacaaacttctaaaaactatattatttttcacgatattgcataaaatcccaattttaatttcttatgcttctaaaaataacattatagattttgtttggatctagtaattataaatcatacatgtttagaaatattttactagaactttttaatatacatttgtgccttttttgcattaagaaaaaacgttcatgtacgttgaaattggattacgacgagctagtttgaaacatgctgttgtctgttgagggtctagatctggaagatgggctcagcagcatgcgacacgaggaagtgagtgggtccagatgcacaacaggatagcgggcgacgaatgaaacgctgaattcagcgtgtatgatgctctgcactaaatttattagagtagatataggaccctgctggatggataccggaggctacgatgtactatatgtagtggacagaccgctttagcggctgttgctggaggtagccttatttagggcgtgtttggtatggctccagagtaaaactttgagaaggagctggtcagggcatgctaaacactctaactccagagttgtaaactctatagagtttttggagctacagtacatttttttggagtgcctcttttgctactctgaaaactccaaaaaagcaacatagtcatgaagtttgaagttatttacccgccattgccacctgttatgagaaacaatataaactctggatcagagctgcttcacccggagttttagagtagagctactctagagtggagtagagtcatatcaaacatacccttagaactctagctataaagtcagagtttttaagtttgaatgaaaaatataaataggcccgtgatatacattacagcccagcaaaaaacagtttaaaacccacaacttcgttaacggcagtccgcacgcctgtagacaatcgcatagcgcactaacaggaaaggaagtccaacgataaatgattcagcctgcgtatagcccacgaaaacttccgaccgcgaaaaacgcgggagggcacccacggcggcgtcgatgggagggcctccggcggactgcaccgacgggagggccgagggcctccgcacggcgatgcgggaggaccttaggaggtggtggcctctcggacactcgctgcgacggaacggagaggatcgtgcaaggaggtttcaggtttgctcattggctgtccaaccgtttctgcgagcccgaatcgttccatgtcttttgacccaaacagtccggcttcatgatgaatcctggctgccttatctcctggtgctgggccaatcccgcaggcgaaaggtaggctgattgagaatatcgatttttaaagagctaggatgatcgcgatctgttcgcttgtttttaaggtagtaccgtaccactttctaccatatttttgtctctatagattactacgttgcagcaactggctttaatatgaagcacgctagtttttatggcgtatcaggtaaagccaataacatctaagttaatttgcatacatacatatggcgcgaagtgcacgtcaggcaaccattcgtaagactttaagataattctcaacagatgtttacgagtgtaataacgacagagaagtgactaatggtgcgtgcttataaactattctgcaacgcttgagtgcgctggtcttacttatgggccatggtccaaatcagctcacttcgagaagatttccgcgttttcctttttcaaaaggatagaatcacttttcgtatcatggcctgtgccgtgactaaatgacctcatatgaacacacatgtgaattgtgctggttttctaaagtggtcttcattactgtgatacggtcatacggaattttattccataagtattccaactgtcggtttgccacttgttttagataattaacgggcagggcacgatgaagtctatggtgctgtggttgagtagttgcagtctggagtacagtgttatacattaacgaaagtggcattgcaacgaattcagatcctacttctgcagaccaattttcagaaaagttatctgaaggcatgatcaggggagggaccttttggactacgaagctagtgactgtcccatactagtgcaccatggtgctcacatcatctgaaacatgtaagaatcctgtcaccctcgtccctcttttacattccaaatattttagatgggaaagtataatttatcattcagattgatgatgctcacacagcgtttacttcattgtatttgttgatcagatttacaaagatttgtgggacagttctgtactacttttgacctagaattcaattcaaagatggttaaaacagtcgcaattgtgtaaaaaggcttggtgcctgtcttttactttagtaataaaaaattgattaatgaacatgaaaatcaatgtcaatacaaacgctatcagttatttacacaaaggcttcatattagctgtagttttgtacaaaaggtggtcaaactgagaataaataactatacaggttttcttcaaaacaaaacactactacaggtaaacagtaaacttatggcagtaactttggattgttcatgagaggtacctttgtgtactgttttcaaaaggttatagattttatatcaggtctcacaccaaccacacagcatgtatcacatttcacttgatatatatcaattcagatagtgatcactagtattttttacaagaacagtcatcagtaggatttgttctttcttgttagaccatccaagcgtatatcttggtgtaagtgcttaaaaatgcgtaatgctacctgtgttggactctttgattgagctttggaaactcttaatgcttgctccttgaatggtgcaggattgctaaggtactatagctccttgcaaatatccatgtagaagattactgtaggtcttccctacagtaccttcacttcaaaaaaaaaaatccatgtagaagttcagttcggcagtctctttggatcaaaatcaagaactcaaagaaactatattagctacaatactaatggaagtatttttttgcttttactcatgtttatagaagggtgatatttactcatgggtgtataacatcgtagacatgaccatcaccagggtccaagaacatctgttgtcaccctaattaactttactatattaggagaaggctcttaactgtcagttgcattagacttagacctgatattggccctgtttggcacagcttattttcagcttcttcacaaatttaagcagaagttctgccaaacaggcagcttctgcagcagcttatcagttcagccgcttctcagaatacactaaaaacagccaacaagcagaagctgcttttcaccagcttctcagataagctgttttttcaacaagcagtagctgtgccaaacagggccattattcaatttgtttcactcaagcttatccccatgtttttgcataaaccactcacatgaaacagtgtaaaattgtattataaactcgttccttttaattcacattactagtaaatctcattactatctctacattttgtctaatgtgctgcaaccttcttaaaatgcataaatctggagaaatagcgaaatctatatgattttctataatttacttctactaattccaccaatcttgggccttaagaagtgcatgcttccgatgtgaatttgcaatttttcatgcaactactctctccgttcttttttatttgtcgcattttagtttaaaaatgaactagcgggtgacaaatattcgagaatggggtagtacaatgaaagtaagcacctaactatatttaaattgcaaacaaggaaactgatttaaccaaaattacgagatttaggaatccctgaatctaagcttggatcctgcacatttcagcatgtacatatctagaagttttaacgactgacgagacctgagaatctaacaactcacactctaccggtctacccatatttagagatgccttttcatgctggactaagacgtacacgttcatctacccatgtgcatcctttaaaaaggttaccttacagttcttcacataagtaggcctcatgtgtgatatgtcaatcttgagattctaatatggcataaaaatattatctactacatccgaaaatctggatatatatgtgttacttctgatgtttatatgacactgcagaggttgttattggcaactggtcacagcagaggcagcagacagcagcacaattagcaccggtcgtcgtcagatcacacctctgaagttctctttatattatgaagcctaaatgaagaggacaatctgtttctccagaaacatgtagatgggcaaagtgaaatgcgataatcaaacctgtcttgaaggtcttcactgttgcaagaataagagacaataatatgctacttgtgtctttcttttaccctaagagacctgagcaggtggaaccatgcatgtcacgttgcatacatgttgccatgttggttgagttcaaaagtctaaaacgcggttactagagttaagcgcagatttaaaattatggaagcaagcacgcaccaccaactctaggtcaaggttctctgtgcatatatgagctccaggctgtgtttgtctgcagcactagacaaggagaataaaactcatcatttgcacttcacaccagccaagggctcagcgttaattgccgggaatacattgggagctctgcaatcgcaagctagtttgctgtcaacaacgtgcatcctttgttgagaggccatatcgattagtttgaagacgttgcaagaggccagccatcatggctaagagggatggctacatggacagctcttgtggctactctaatggaacccctaaaaggctggtgcaggatagtagcagtcatgtgcaggcgcatgctaagaagtaagtacagatcatgttatgtacactaaacagagttaagtatgtgcacattatatatactaaacagagttaagtatgtgaaccgcaaatggaattacgataaatatagaaggaaaaatagttagctatgtgtgtttttcagttatttcttttgctccacatgatgttccttgttcttatcacttgtgctattcattttgtttcttgttatgtttccaagttattaatggtcgtactttcctgagtaggaaagttcacattagcacaagaactcagcacacatacgcaccgtatcatgatggctaccagtggagaaaatacgggcaaaagctgatccgaggcagtacctacccaaggtatgcctaattaaccattcaatctttttatcttgcattttttaacaagtggagttaatagttacagactcgtgtaatatgttaattatgttgaagtacgacaattcattacctaagaactactaccttggctaattagcaccgatgcacatcagctgaaatagaacagatccatatataaccagttacatcacacatgttccaactggtccatgctccttgggtcttacagaagcttcctaatatataagggatacaaaaggagcttaaaaacggcagatacattagtgcagatgtatcccttgcctgaattaacatagcaaatccaaatattgaagctcactagctgtaaatagtgaacgttttcgctataatacacgtgattgatcgggcttggttagcttatcttcgcaagcctgaaagctggctttctggtcgcataaacgtagtttaatggaagtgtgtttgggagtacaataaaaaaaatctggtgcgtgtacatttatgatttattaggttgctgtcttcccagtagcagcctgttcctctcaggctgtagcgtaatagcgtttacctttatgttgtcgtgtagctacaagccacatgccagaataggaattttttaaagaaccggaataaagccaaagggggaaaggagagaagagctaagcaccatacgctgacggaatcattacacactctgcttttgtgcgctttgtttattagtgcggaacacgaattagtttcctaattagcatgcagaacttgcttttgagtagaccacggttctgctatttgttgtttttttatacaacatgaatggcctgctgcgtaggactaggttttttatgcaaatgcttaatgtgaatataatatatttcgagagagagtggtagtcatatgggtactgattagacaactgattatggttagtcgtcgattagattcgattagtggagtaatcatgtagtatagatacaaggatagacgtagagtaatgatgagaagtggtttcactgagccaaaagtcctgtgtccgcgtaacctctcaaaaatgaagggggtgttcgtttcgaattaaggccagctgtttaaactgtagtctttataatttataaagacaaaatactgtaaaagtcggtataaattaaagccaagatgaaaggtaacttgtcgaggttatatcccacttacgtgtgggagccgccaacactagatctgtctttttttcatttcatcaagcagtacagagctactaagtcgaccttgcatttgagcggtaacaagatcaggacttgactaggacggaaggagcagaacttcccaacgccatgccttgatcttgccgctgcctgaccagctttatggcccgcaacccctccatgttcagcagctgcgtgtgtgccacagtgccacctcctggtctggtccttctgcagcatctcgagctcgcgctcatggttacgttcccgccagctcatgccaaagacagctgagagatgcttgagaacaacggattcagcaaaatctagcggcagcttagggatggagggatctggtgggagacagcgttgagcggcttgatgatgatagccagcagcgaagcaaggatgcgagccggccgtgcaaggatgagacatgagagttgacagtgctagctcctcttcggtggcacgagcgtgaattctggagtctagtccagaacacaacgatatcttgaaaacctaatggacaaaactaagcccaactgttcaagcataggcacttccgggtattcatccacaggcccctaatcagacaactaataatcatgatttatcgctgatagtcggtgagaaaaatagaattttaccattattaacagtgggcttcgcaaatttgatcgaatttccattacttgtttatagtagccctacttgtatcgaagtgcctaagatctagggcggattaatcgtctgatttaacactataaaggacagtagtacacaagtatgatggatatgatctaatgcttctacataggagtgtaccaataatcctgtagatagatggcaaaaggttaagtttgcacctctgtcttcaaccatcattttgattgataacaacacccaacgctccccacccctctcaaagtaactcattgtctaaaatgcatcatgcttattttttatcactgttgcaaggccagccaataattgaaaatcgggattgaacatcgatcatgaagtttcgagaagagaatcaattatatcatgcaatgccttcaatttgtgcatgggaccagagtcatgtttttagctaggttgatttgctttatgggcttttaaacttggcatttctgccaaagagttagaaaaccgatggaatccataggaatgctgtgatatgtattaactttacacccacatacacggtactaacataggaaatggaaacttttggaatggtgcaaattctcgcagcaagctaaggggacacatttcatatctggcagggtagcaaaagaccacgattagtatatatggatgcaagctaagggggcacatttaatattaagtacgtcggcctcaacgtaataagtacatcgaccaaatacatcggttaatcgacgtactaacctaagtacgtcggtatattagagtaagtacgacggttccagtttgacattctttaatcgtttttctgtagtgaacctctttttttattttttatttttaaggtaactagtagcattgaacgtgcagatcacatgtatgagtagtgttgcataaacaatttttgtacacgtaagtgttatgaattgaaatttgcttttgtcaaagttattattgagttagtagtcgaatctagattagctatcagttaccaatttttcttattttaaaaggggagatataatgcaagtgggtctgggaaatagataaaccgagtcaagccttgttcagttaatcatgttatccatagattggataggattgaaaaaaattaagaaaaagtttgacttgcttgggatttaaacccactcaatccatatggattgagagctaaccgaataagctcttaattgttttctcgcaaatgtggagaggctatgccaagtcttctctcatgcaaaatgtgtactgttcacgctgggcccagtacgttgacttgactttgggcccaacaccttcatagtttgtcacagttatttaggcctggcatatatactaccacattatcagtaagtattggtgacgctagatcctcagtaagtattggtgacgttagatcctcaagtgtatgcatgtgataccagtacctgggaaaactcccggcattggggtatgatatccagagcatgcctgcattggaatcctcctttggagctaataatgcatgtcggcatgattaactattctgagccaggcggacaacgccacgtgttctcatgtgtcaagtttttcggcttttacaggcatgcatgtatgcatgttggcgacctcttttttccctaggtcatggaaaagtgaactctaaactactcttgatgtctacacatgcaggtgctactataggtgcacataccaccaggatcatggctgcccagcaaccaagcatgtggagcaaaccaattcccaggacccgccattgttccgggtaacctacacgaatgagcacacatgttgcagcgcccatgtctcagattacatggcttcatctgtacacatccagcagatcgccgatgcttctttgagaaagctagcagatgtggaaataccgagcctgacccactgttttagtggccatgaattgataaaagaagagaatgatgccgtcatctcctcattgctcacggccgtcagtggttgtgatgtggcaacatccgatggcgtgcatgcagccattcaagagaacacacctgctcggatgtcccgaagcagcaatgaggctagctcttcgatttcaccacctgtactgttgccggcatccgataacccgaaaacagacttcatcgagccactggagacccaatggttcgagcctttggatttaggttggttcatagaataaactgactggttgatctatcatttattatgttggtactaaacagtaaacacatccataaccatcctgcggttctgctagaaaatatgtaattgttctatttactgctagagctctctctctatattttgtttgaaaccatacgtatatacttgtttaatgatccgattttttttgtgaaagtaacatttaaagtggtttagattagaatagtagaggcgagtacgccacatgagaaaagtagttagtaaatgtttgcttcaccaataataaaaagggtaaatacccactagaagatatctatcgatagtactccaggactattttgtttttttctgtagatttctaaaatctatttttggattgtagattttgaataaatgaattttacaagctgagattattgttcatttattttggatgggctggtccctggtcggcagttttccctgtgtatatatagtgacgatagctattctgagtgtctacattttttgtgcttttcaaaaaaagatatctatatattttgtagttttgtactatgattccagctatgcgcctatgcgttcctattattgtttctaaaatctttcttttcacgataattgatactcccttcattcttttttatttatcacactataaatattcaagaacagagctagtatttgataaggtgttatgtacttggcgtcgtgaccagatatgatgcgtattcgcctcgtagctggttaaaaaacataacccgaaaaatgtatgtaaaaaatatacataaagccccatataaatcataaaaacaagttttctatgcttttcatatgaagggacgcaaaacaaagaattagcaatattatcatggtagcttatgattatgatgcgctgccagtgcttgtgcactccatgagctactccttcgcttgccccggacttctaggttctctttatgatgtgtttgattttaggttaaagtagtgtaaggcggaggcgatatcgtcccctcaattttttggatcacgttgccaccaaaaaaatatttcggtgtttacctcgccccccccccccatatgactctcatccaaacactataaaaactgtgaccgtctccttcca

SEQ ID NO: 640 - protein, 240 aa, Zea mays
MAKRDGYMDSSCGYSNGTPKRLVQDSSSHVQAHAKKKVHISTRTQHTYAPYHDGYQWRKYGQKLIRGSTYPRCYYRCTYHQDHGCPATKHVEQTNSQDPPLFRVTYTNEHTCCSAHVSDYMASSVHIQQIADASLRKLADVEIPSLTHCFSGHELIKEENDAVISSLLTAVSGCDVATSDGVHAAIQENTPARMSRSSNEASSSISPPVLLPASDNPKTDFIEPLETQWFEPLDLGWFIE

SEQ ID NO: 641 - DNA, 3 bp, Zea mays
  misc_feature (1)..(3): n is a, c, g, or t
nnn

SEQ ID NO: 642 - protein, 980 aa, Zea mays
MEAALLSGFIKTILPRLFSLVQGRYKLHKGLKSDIKSLEKELHMIAVTIDEQISLGRKDQGAVLSLSIDELHELAHQIEDSIDRFLYHVTREQQASFFRRTVRSPKTLLSRQRLAAEVQFLKKIPEEAHQREKRYRVFAGLSSSTRHTESSSCSSVSDPHTLKADVVGIDGPRDELVQQLTEEAEGLTKQLKVISIVGIHGSGKTVLAREVYESDVGRQFSLRAWVSATDRGPREVLMEILRNFGRPVVDSSSIDQLTVDLRKHLGEKSYFIVIDGMQTDQWSTIETAFPENNVVSSRVIVTTTIRSVANSCSSSNGYVHKMKRLSDEHSEQLFIKKACPTKYSGYTRPESKEVLKKCDGQPLALVTMGQFLRKNGWPTGPNCENVCRDLRRHLEQDDTLERMRRVLIHSLSSLPSHVPKACLLYFGMFPCDHPIKRKSLMRRWLAEGFVQTQPSSSENFNTLIDRNIIEPIGICNDDQVKTCKTYGMMHEFILLMSTSHDFITLLCNNKVEHKYVRRLSLHHHSATSGSFSVIDLSLVRSLMVFGEAGKTILSFRKYELLRVLDLEQCTDLEDDHLKDICNLFLMKYLSLGETIRSLPKEIEKLKLLETLDLRRTKVKTLPIEVLLLPCLLHLFGKFQFSDKIKITSDMQKFFLTGQSNLETLSGFITDGSQGLPQMMNYMNLRKLKIWFERSKRSTNFTDLVNAVQKFIHDDKESNDPRSLSLHFDDGTENILNSLKAPCYLRSLKLKGNLLELPQFVISMRGLREICLSSTKLTSGLLATLANLKGLQHLKLIADVLEDFIIEGQAFLGLLHLCFVLERATLPIIEGGALPYLISLKLICKDLVGLGDIKINRLKCLKEVSLDHRVASETREIWEKAAEKHPNRPKVLLVNSSDESEIKAVDCSVASRPAVSEANGTSPMSEVDVREDDIQMILNQGLSAAAEKQMNCAVQPSSKAELNSDFNNISFPEVALGLTEL

SEQ ID NO: 643 - DNA, 8448 bp, Zea mays
gctgtgcgggagtgcggcctgcgggagtgcggcctgctcggttgtgttattaaaatatttgttgcagacatgagcacaaagctcatctagcccacttggtagagcacaaggcttctaaccatgtggtcgtgggttcaagccccatagtttgcattttttttgtttttttgtttatgtcgtgggttcaagccccatagttccgcttaaatttatttctcgcctagatttttttttcacaattgaaaaaatcgacccaaaatatatgctcatgtactgatcggccaatatctctgtatgtgaaaggttgtggagaataataataagtagggcatgctgtttatcaaagcaaatgtatataaggaagaaaaaaatgtataaaaatatttatagtgatttagaaatagttaatgattcgtaatgcaaattttgaataatgcacggatgacattttataaaattactacattgcttttgtattgcacatgcatgatttgagctagtcgattatttacgcgcattttaaattcggaaactgtagattgaaatgcgcgcgcatgcagtgcaagtatggaaggcaacactaggcacaacgacataaaaaaatctaggcgagaaataaatttaagcggacacaccaacgacataaacaaaaaaaaacaaaaaaatgcaaactatggggtttgaacccacgaccacatggttagaagccttgtgctctaccaagtgggctagatgggctttgtgctcatatctgcaacaaatattttaataacacaaccgagctcggcgccaagatctgtggcgccgagctcggttccacgtcgacgccacgcgtctgggttgtgccaacgcaacacgacctcggcgccatagcctatggcgccgagctgtgttagctcggcgccatagcctatggcgccgagcaaagggtccaaaactgcatttaaaatttttttaggtctaaacgtgattttacttctgtttaagggctaaaatacaaaaaattcggtcggtccgtaacgtgcactctgcactctactaagcgctagtgtacgtacgtacgtactccgtccgctgctatattatggccggccgtggcgtgccctctctagccagcacagcacacacactggaaagtgcaagctgtagtgagacctgcgcgactgccagcgtgtatccgcgcggcaaggagcgtagcgcgcggtcgtcggcccgcacggccaccaactcccttggacgcacgcgcgcgcgcgaccagctgctaaccgtgcgcaagtagtagtgcgacttcgccgccggccgggatcgctagctcgatcgatcggcgggaccacatacgactccggtgtggccagcggcggccgggccggggaacgcacgtgctgcgagcgagcgagggcagacgctagctgttgccgggagctagccggcgcgcgatggggagggcgccgtgctgcgagaaggtggggctcaagcgagggaggtggacggcggaagaggaccagttacttgccaactacattgcggagcacggcgaggggtcctggaggtcgctgcccaagaatgcaggtaaaccaaagccggccgcgcgccatgcatcgccacgtagcatcaatctccgatccatgcatatatgagcttcttcttcgtcgccgtcgtcgttcttagctagttaggacgcgcatgcaggcctgctccggtgcggcaagagctgccggctccggtggatcaactaccttcgggcggacgtcaagagggggaacatctccaaggaggaagaagacatcatcatcaagctccacgccaccctcggcaacaggtaacaataagcgcgccctaatctcaacgctgatcactgtgcatccgactagagagtagtagtactactacttccttcctttatgcatgggagtcaatgcacgcagtcccaaaaaacttggtatacgtacttcctccttcacacgaagaacggaaatctagtccaacaatatcaactttgatcaaggcattcatatatattatgaaatatattttataagaaacttccataaatatataaatgttgatagtactataaatatagttgattgagagagttttcttaaattgtgaggtaccatgtatacttttatatatactacttaaacgcttctcgacgtacaaatttggggaaaaggatctctggcacaagactagaacagtcagcacagacaataaagggctactccgatgaaaatctcgttttcattcataggagtatagagtagtgtagtaacaattgcctgctctatatgctctctcaattactgaaatcttagagcaaatattgagattgatgagagagagagcagaatcggactgcaaacttaaagtcggggcttagacacagaactaaaaactttttttgtgagaaagacatgcaaattataaattaatagtgaagagctaaccactacacggataggctaatgtaaatcataaattaatagtaaagagctaactactacacagatagactaagaagtagactataaggttccttacttataaccagcggttgactatattattaaacttgatcttataatttcgatagctgccccgatcggttgagagttaagacaccgtataccatacacgtacacagtactaaataaagaattaaatgatgtaggggcacacgctgctggaatagaggcgcgcgcagcaatagtaggctaatgtcctttttttctatgcatggtatgggtcccgatcggctttatcactgtttagctactgtagtgataatgtccaaaaagatggtttcatcagcgaaagacaaaagagagagaagagagaagagagaagagagaagagagaagagagaagagagagagagagagactcctataaagagtagtgttgctatagtgctagaatggtgcatattactacagtgcatatatgtgagaaagagccggagctattgagctaatacaatctatagggcctaaattaatagagacatggctgaaaacaatatggccatctggtccctccgatcgatgtgctgtagtatgtttatgtacacgcgggctctacgcacgcttgctctagcattgagcagtgctactttactacactactatcagtccggtccttgtcagtcactggctcagcatgtgtctctgaagttgcccgtacgtgtggcagcagccaaaagggcgtgctgcgtgtgtaagtttactgtccagtcagatgcgtgtgatttccgaggccacgtgcacgagcatgcatggcgccaacatggcatgatgtgatgtttgtttcggccttttttttagattttggctaccaaaatctggtacagacagtcaaatattcaatttttagtccacttctataaaaatcgatttggtaaaaatcatccaacaaaatcaacataaacacaaaatcggtcggacgttgcaatagtaggaatctatcactttctagattgttaaccctatagacacattaatcttcctccgcacataatcctcacaatactcatattctctctgcagccaaattcttttaaaaaactggtaagaaaaaagatgaaccaaacaggctcgatgatgctcgccacttcttatgacttcgcatatgtggcaagaggggcgaaataggttgctaactgtggatgcaaatgcaccctgtaaaatacaatttctataaattcagtcacaatttcactatatatgcactcctagaaaaagttcttatctacccacaagactaaatacaccctctcaattataatctagcttcgctattatgtggtaatgaggtctaaaactagggggtgtttggtttatatggactaattttagtttctgtatttgacaatttaaggactaaaataaaataaaatagataggctaaaaattaatctttagaaaccaaacactctctaagctgatccgtcatatattcgttacatttcatctctaagacgaaaagcagcagcacgaggaaatgatctaggcactttctcgtgctcaaagatttgtgcaactaagggaagattagaaagctactactgagcagtactgtgatagcgtcatgcgtgcatatacacacacaccttccactccataaaatgcagggttttttttgctccatcagttttgtttaacctattttttcccaagcaacttctttgattttgaccagtggcgggacgaaagtccaggtgaggccaatccgtaataaagaaatcacaagaaaaaatgctaaactataagtggttttttggtaatagcatgaaattaagttgtaatatcatgactattataaaataatgtggatatcgaaaatctttttagcgacgccaaatcatcgatagaaaattcaatctacaattagaagaaaaagtattaggtaagcatcaatgtaagtaaaagacaaaactatatagaaaaaacatcgaaaacaccattaaaccatcaatcttgtggttgtggcagcttgcactctagtgcggggccgtggccgagtggaggcaggaagacgagcagcaagctagcgacagtgtcctgacagctggcgatgacggttgggtgggcggccaacgatgatgaactgactgttggacgtcaattggacagcgggcacaacgctaggacgagcgctaagcgggggttggatgctacaaacgtgcggttgatgcctttctcattctgtgttttattcgatataggtcgtgacctaagatgatgggctagatcttgtgggttagtcgatggtatgatgtggtggacccggtgtttatctaatttagtcgcatataccttatattttttattttatagtatatataaaaggtaggtataaacagttccaaaaattaaggtggcgccatggcctactttgcccacattgtggatccgcccctgattttgactgaacttggataaaatatactggtcatagtatttataatacccaaaaaaacaatgtcatggcatttattaacaacgggttttcattaaattaaactgatttggtttgccgtaaatttaggagaaccaatatgatcaatgagtagcgtatatcttacagtacagaaaaatctttgaaaaaaatatataaacagcacacaaaagcatgcgattcgtcgacagcatcgtctcacggtctcaccacaccattcaaggacgatggagcttcttcggtgctcagactttatttctaccatctacaacccaaactgatatgtacagtaaatggaaggaagaacaagatagagaaaaaaaacccaaactgatagattagaagtcgctgaagaaatcatctaacaaaactggcgagctatcaaacaggacacgggagagaatagatgattaaacaataatccctcgtgcaatgcatgccactgtagcgccgtaatataatgatagatatgcgctattgctcctacaactacaacccacatggtgttgcgagagctagcggtgccacacagtcatggaaacatggtttgtgaaagcagcttaactaattactagctagctgtgagtcgtcagcggctagcggagagtgagagtgagaggaccacgcgaaagaaacgacaataatctggtccaacactcgctcttcattcaagctagctagcgctgggagcgaactcgcgtcgcatggcagagcctgcctgctgccgagcggacaggtcacggtcttcttgacgcacgcacagtccatggcgttggttggcgtcctgtccatttcgctttgctgcctcgccatcaccgccggccggtactgtgcaaagcgcgcattggctagcttccctgttgccttgatctgatcatagaggggtccctgtccgtggcacacagtgggattaatgacgggcccacgccggccctccctaatgatttcccccgccttaacgttgacactgcggacggtgagaggcgcggctgtggacgtacggcgagatctatcgggggcccatcgtccttcgcgaacgatgcgtacatttagcgccatatataaacacacgccggcacatgattactacggcctatatacgcgcgtcgtgagcggcgcgatcaatgagtgagctagttcgttgcaccaaattgtcgatcaagttgcatcagacagtagagtactgtatactctctctatatatatactccctccgtttctttttatttgtcgctggatagtgcaattttacactatcctgcgacaaataaaaagaaacggagggagtatgtactaggcaggctaagaaacacgatagataccacgcattcggttctcattacgaagctgcagctgcccaaccagcagcgatgatcacgtacgctcaccatcctgcgtccttgcggtttaaattaattacgtatgtatccgcatccgcatgcaggtggtccctgatcgccagccacctccccggccgaacagacaacgagatcaagaactactggaactcgcacctcagccggcagatccacacgtaccgccggaaatacaccgccgggcctgacgacaccgccatcgccatcgacatgagcaagctgcagagcgccgacaggcggcgcggcggcaggaccccgggccggccgccgaaggctagcgccagcaggaccaagcaggcggacgccgatcagcccggcggcgaggcgaaaggcccggccgcggcggcgtcgagcccgcggcacagcgacgtggtgaacccgggcccgaaccagcccaacagcagcagcggcagcacgggcacggccgaggaggaggggcccagcagcgaggacgcgagcgggccgtgggtgctggagccgatagagctcggggacctagtctggggggaggccgacagcgagatggacgccctgatgcctatcgggcccggcggccacgactcggctgccctcgaagggcttggcgcggtcggctgcgaggcccaggtggacgacctgttcgacatggactgggatggcttcgcggcccatctgtggggcgggccggagcaggacgagcacagcgcgcagctgcggcaggccgccgagccgctggaagttgctgctgctgctgctgctgcgacggcggcccgcaccccggacgatcgcgagctggaggcgttcgagacttggctcctgtccgactcgttctgacggctccggtcaccggaccgatcagacagaccaaccaaggtggcccggccatatggtcgacgccgctagtaggcgttgctcgtgtgtacagtttttttttcttttttgtagattttgttcttagctcttgctgtttcgtgtatggcatgtagaatagagagcagagagtcgtatggcattgtaaaggtagttctccgccggtgaagtgaagaccaataaaaaaaagcagcgcagcagtaggcgctgctgcagcctgcacggcggcgttttggcagcgcgtgctttggctttttgtgaacagtgatgggaatgttgttccttctgccctgagtcctgaccgacagtctcctcgttggagaagaatgtacgcggagacccggcgacagaacgaatgagtgagcagcgctggactgtctccgagctgtgaaagcatgaatcagtgcgccgaactttcactgctctgctaggcacttgctactccaactgttacaacaagcacccatctgcgctgcgctcgtgggcatagtgagacccattcctccttcaaccaaggggatagtagccgacagcaagcaatgacacatggttttcgtgtccacgcggaaaaggccagtcagtagtaccgtgtactgcgtacaacctgataagctctgctcagcgggactcacagtgcatgtcgcccgacgctttcgccgtcggcgtgggtaaccattcaccagcacttcacgtattgcctgacgatcatatcatatcaagcaggtcgtcggtacacacgacggcgggcaaaaatgaaggcaggattcgaagcgacgacgcctctgcccgagcacgttctcccgtcgtcaggtctcgctcggcagcactgcacaccgccagtggcccggctccatgccggcccaacccaactgcgaactgtcaactgcctgccttgtattccggtccgcgttcggttcggtggcctgtcagtgtccgcgcagccaaaacagtcgccgcgtgcccggcacggccgggggggcaggccgatcgcgcgtccgggtcgcgcgattggcgcatgtgttgtggttggggcaggccgcaggcatcagcatcaggcttcccagtcgaaacgtctcgctctcggagtgttcccggcgtcagatcgatcgatgcatccatgttgtttgtcagtcgatttgccttgccgccgttacattacattctcgccagcctagctagcctagagacgccgcgcgcgtccgtgatgaattaggctcgctcgaccgaaagcgaggtgtggaatggggaaggcagacgatgagga

SEQ ID NO: 644 - protein, 376 aa, Zea mays
MGRAPCCEKVGLKRGRWTAEEDQLLANYIAEHGEGSWRSLPKNAGLLRCGKSCRLRWINYLRADVKRGNISKEEEDIIIKLHATLGNRWSLIASHLPGRTDNEIKNYWNSHLSRQIHTYRRKYTAGPDDTAIAIDMSKLQSADRRRGGRTPGRPPKASASRTKQADADQPGGEAKGPAAAASSPRHSDVVNPGPNQPNSSSGSTGTAEEEGPSSEDASGPWVLEPIELGDLVWGEADSEMDALMPIGPGGTTRLPSKGLARSAERPRWTTCSTWTGMASRPICGAGRSRTSTARSCGRPPSRWKLLLLLLLRRRPAPRTIASWRRSRLGSCPTRSDGSGHRTDQTDQPRWPGHMVDAASRRCSCVQFFFLFCRFCS

SEQ ID NO: 645 - DNA, 2572 bp, Zea mays
gctggagtccttatcccatgcgtggttatcctaacaaactcggacggaactattggatctcgcctaggaatgggtccaaacccccctatatacatgataggtacgaccaaatgagaatacaagatcaaatcgaaaccaatttattacattatttatcttcatgccttaggagtagatgtagtgtagctctagttgtagtttcccaaactcaaccttgacctctttagctctacgtcatctagaggtgctttaggtggcttgttgatatcaaaacaaccctatgatctcttctccccgacggggtcctcgagagacgatatttaggttctacacaaaaccctctacggcatcgtggatggtccaccacctacaagtggacggtccacgcgcctgcagagaagagcatagttatttgctccatggtgacctacacgcgaacggtccagtgacctatcacgaaccgttcagcaccttgcagagaggtctccaaggtctcgactactcatgagcggaatctagtgattattggtgtttagcgcaaaaacggcgccaacagtagggtttacgtgcgaagtaagatggagggtcatagagtttaagatatagaaattgacagattcctcctattgttggataactcggcggattttgttcagattgatttagaccattttcacacactatcagatgccgatcctagctaatggccagaatctgagaaacaaacaccccgaaacgtacagcggtgggcgaggtggttaggtcactgttcaccgagttttgataagtttctgtccgcgtcagcgccagctacgcgcgctggaaaatgctgactattttggctgcaagcatgggataaccatggattttttttcctgcagtgttgctatctgttctttgtttcgtagtggctgtttatcctcgtgtgcctcgcgtgcgtatatacacacacgtcctgcctgcacgcaacgcagctctataaatacctcatcaccggtgcactcgcttaatatatatccaacaaccagcagtgcaacaagcaagatttacctgcccgtgagtgtgcctttcaataatataatgtcttattttattattatgtttttgcagtgatagtagtctgtaataaatctctcctttcaatatatataattcacatgccagatcgatcatatcgtcaactggtccggcagttcgcgacaccatgagctccacggagtgcggcggcggcggcggcggcgccaagacgtcgtggcctgaggtggtcgggctgagcgtggaggacgccaagaaggtgatcctcaaggacaagccggacgccgacatcgtggtgctgcccgtcggctccgtggtgaccgcggattatcgccctaaccgtgtccgcatcttcgtcgacatcgtcgcccagacgccccacatcggctgataatatataagctagccgctatttcctttccttgccccagaacttgaaataaatatatatacgatgaaataacgcgggcatgccgaataatggatgtgtgaattctcactaattaagtaatgcataaataaacgtattcaaatgtcgccccttcttgcacagtgaatatattgtgttgacagcaaaaaaaaagtatgaggttaaattcggtacaattaattatgggcctatttggatcgtcaccggacgaaagtttagcctaacgttgactaattaagaaattctaatgagttctactcatcaattagcttctatttgttcttgttaatttatgtttagatcttagagttggcaaccgaagtatgcagtaaagtttagtccaaacatgccccgtactgaagataggatctgattagaaaataaagtgagaaaacatgcgtcctttgtgttttctcttaatatgtcctaaaatctctagaatgaaatatatcacaggggagaggaattagggtatagatcatctgcaagttttttttttatccaccggaaagtgaggttaccaaagtggggttactattaggaggttgcagtaagattttattaaaaatcgaagggcaggagttctatatgatttcccccctactaattacacagtagacgcacatgcataaacatacgcacgcaaaccatatatcataccaacgttgtagcagtcatcgtgtcgactaaatcaacgtgtgttagtgcttattatagagccttgtgtcaagaaaccattatttcaaaccttgcagcatataatttacaagaaatctgtatatatcgattgatggtgtatatatagctcctactttggttcttataaaacacaaacaaacatctgaaagttggcaatttgcgtgtatcgccgatctggatatcaaatttccatttattggtgttattgaattctacaagttgttgtgcttcatgaactgcattggaatattagattctgacggatattacattcgtataaatgctgacgagttgtgtaaagtccacatgataatgagttcatcttaagtgaccatgcttccgagatgctgatagttagtgctgcctaacaaatcagaatgtgcttccaagatactgatagtgctgtcc

SEQ ID NO: 646 - protein, 73 aa, Zea mays
MSSTECGGGGGGAKTSWPEVVGLSVEDAKKVILKDKPDADIVVLPVGSVVTADYRPNRVRIFVDIVAQTPHIG

SEQ ID NO: 647 - DNA, 3864 bp, Zea mays
ttgggtcgtaggaagttagctaggggctatagttagtcgtaggaagttagccagctaacttcctaggggtacagtcagccgtaggaagttaatcagctcacggcgctgacggcgtgaagctactaccttccgagaacctagtaacttccgagaggcttctttggctgtaggaagttagctaacttcctagagggctctaggaagttaagctaacttccgacaaaaaatttccgagagccaaacttccgacgggatggcttaacttccgagagttcagctaacttcctagagtttaggtctaactttctagggtttaggctctaggaagttcactattttggtgtagtgactacacattaacaacattaatatataactagatattaacaagacgtcatcacataaaaaaaatatgaaaccctaaaaccaaaaaaccaaatttagagactaaaattactagtagcgggtccatacgttttcctattttttaatcgactaaactaaattaaatttagatatcatgtatatcagattactcactagaacatgtagtattttaatgtccgacagtttaggccttattttcgacgactttggctatcggaaattttatatttcagtgttgtgttgcattccaatcctaagagcacgatttcagattttggaaatcacttttattctctagcttcatcataccaaggttagcaactgctgcttgtattgcttgcagacgtgacatcgcctcaatctccagtgcaacttcaacagcatccatttggtctgtaacagcaaaacccaaatcaacgtctccgcatgcatgcatgcatgcgggcagccctctgtttaagacgtgcgtcaaggtcctcaaggatatataagatggtgggtccggttcgttcgttcgttctcgttgcctggcgcggctataaaatggcagctgcggagctgccatctttgcacgaagacacacacacacagcagctgagcagcagcaacacgctcccatcatctctcgccatgcgcccaacacgctcccctgtgccggctacggcgctgctcctgcttgccgtggcactggcactggccgccacggcggcggcccgccacttctacaccaccaccaccaccacccgcgtcccggcgccagcggagcgggcggacgaggaggtaaggcgcatgtacgaggcgtggaagtcgaagcacgggcgcggcggcagcagcaacgacgactgcgacatggcgcccggcgatgatgagcaggaggaggaccgccggctgcggctggaggtgttccgcgacaaccttcggtacatcgacaagcacaacgcggaggcggacgctgggctccacaccttccgcctcggcctcacccccttcgccgacctcaccctggacgagtaccgcggccgcgtcctcggattccgcgcccgcgcccgccgcagcggcgcccgctacggccacggccacggctaccgcgcccgtccccgcggcggcgacctcctccccgacgccatcgactggcgccagcttggcgccgtcaccgaggtcaaggaccagcaacagtgcggtccgtagcatatatactccgacccatagcgcgccgtactcttacatatgtgtgcgtgctctccggcgagaagcttgttgcggctacttatctgatgacgatctctgtggggggcatgcaatgcatgcatgcttgcaggtgggtgctgggcgttctcggcggtggcggccatcgaggggatcaacgcgatcgcgacgggtaacctggtgtcgctgtcggagcaggagatcatcgactgcgacgcccaggacagcggctgcgacggcgggcagatggagaacgcgttccggttcgtcatcggcaacggcgggatcgacaccgaggccgactaccccttcatcggaaccgacggcacttgtgacgccagcaaggtcggtatgggtgctggcgtgctgctgcttttgcttcgtcgatcgatggatggatgatgcggtagtactgctgctaatataacggagagatcgatatgactgtgtgtgtacgtgttcaattcaatgcaggagaacaacgagaaggtcgccaccatagatgggttggtggaggtggcgagcaacaacgagacggcgctgcaggaggcggtggcgatccagcccgtcagtgtcgccatcgacgcaagcgggcgtgcgttccagcactacagttcggtaagctagctagctagctaagcatgcatgagaatgagatccatcagacgacgacgacgacgaccgtcacagatttaggaagaactagctagctaggttctgtgcgtgtctgtctgtgtgatgaactgttgtagtatgcactataatgcagggcatcttcaacgggccatgcgggacgagcctggaccacggcgtcacggcggtgggctacggcagcgagagcggcaaggactactggatcgtgaagaactcgtggagcgccagctggggcgaggccggctacatccgcatgaggcgcaacgtgccccggcccacgggcaagtgcggcatcgccatggacgcgtcctaccctgtgaaggacacctaccacgaccccggcaccggcaccggcaccgccacggctacggcagctgccatggatgtgatcaagatggttcttgcttaggagggagcgagcggagcaggcagcagagagccgatggtcttgtcgtgttgaactttacatatggtagctaggtaccactggggataattaagttaatccgttatggtgtggcaagttaattaatatgtgcgtatctcttttgatgagtgccatatatgatgtaatgaagttacataaactcaaataaagtcgtaatcgtaatggtaaagtttgtttgttggtttgtcaggcgggggagtatgggagtgcagggacagagatgttgtgcgggcgtactgagcgcgtatggagctagagcgaggcaatggagatgactgatgaggacatagagaaagccgacacacttacggcctcgtctccggcgctgtgtttttttttttggagccaacaattatggttagtttggtgcgaacctggatttggaataaaaaattatgatttatatctctatttggcatgtgttctattaacttagtttagtgcggatataggtttagagccaacaattattcgtttgaatctcatttagctttttaccgattaaatgtctaaatatggatccagatcagagggacaacggctttgttaaaaagcacaaggttttttttatactccactattccaatttataatttgtttgacctttttctctaagttttactgtcttgtcttattcaaaaattttcataattattattaatttttactccgatattgtttagcatatagtatactttaagtatggttttcaattttctatttttcacaaaaaaattgaataagataagccaaccaaatttgacaaaaaatcaaaagaattataatttaagattgagaaagtataaaaaattaagatggtggagtggaaccgtagaataactgatgttttaatatggtaaagatataaatatatcagataaataataaatgaaaaattgtaaggacgcactttaaaatatgtagccatagttgtcaaacgtcactaaacaataacttaggattaatttagtagacgaaaaaatgaagaagattaatagaataaattttcttactatttaaaattgaatagggagagcgaacgagcgtcgtggcttcacgtggcgtgggttggacttggatgtggactaccacgtgcagccaaagaagtactggagcttccaacagtctaagcagctatgtgggtccatttggcatgctgggatatttat

SEQ ID NO: 648 - protein, 398 aa, Zea mays
MRPTRSAVSATALLLLAVALALAATAAARHSYTTTTTRVPAPAERADEEVRRMYEAWKSKHGRGGSSNDDCDMAPGDDEQEEEDRRLRLEVFRDNLRYIDAHNAEADAGLHTFRLGLTPFADLTLEEYRGRVLGFRARGRRSGARYGSGYSVRGGDLPDAIDWRQLGAVTEVKDQQQCGGCWAFSAVAAIEGVNAIATGNLVSLSEQEIIDCDAQDSGCDGGQMENAFRFVIGNGGIDTEADYPFIGTDGTCDASKEKNEKVATIDGLVEVASNNETALQEAVAIQPVSVAIDASGRAFQHYSSGIFNGPCGTSLDHGVTAVGYGSESGKDYWIVKNSWSASWGEAGYIRMRRNVPRPTGKCGIAMDASYPVKDTYHPGTGTATARAAAMDVIKMVLA

SEQ ID NO: 649 - DNA, 10506 bp, Zea mays
tctttgctgagcaaccagaagagacttcgtgcctgtgttggcaggaggacttccaaatccacttgaaggcatcatgaacttggtggtggctcccaaatcccaattagcttcttgtatatattggcaacggacaatatctgagctcccaatagtgatccaaatatttgtatcggtgtatttgtccatacgcactatctgctcgtcacagcctaagtgttggtgctcggttgcacggcatgattatcgttagcatttcattagtataaagatgggtgaaatccattaggtctcgtttgtttcctttcattttgaagaattgtaatcttaatattggaatagactattttttaaaaatatgacattccatcaatttctaaaattatcatataagcctatctcaaattcatgggtgagagatagaaattgattctataaatttagaaactacttttttgatgtacaacttatagcacacttttctacttgcttcgttataacatgaatatagcatataactacctctcatatgatttaagataatatacaaatatattacatatataaatatatgaatttaattaattttatctaaattataattattaaaatggaattcaattccaatgaaacaaacgggcttgtagagacccgcttcaactaagataactcacacggtgacccagcatttcgttctctgtttgttggatgcactgatgcatcagtttaagtggtggtggtggatcacgcgcctcgcctgatcaactgagccttatttgcacagagatttcacaggctctcccatcgtcggttggtgcgcgcggcgcgtctggcgtgcagcggcggcacgacacgcaactagcgcgaggagggcgcggcagcagccgctccagtcgacttctccgacgtggtctcctcccacccatacacccatcccttcccctcccacacaggcacacacacacccacagcacccaattccctcgcgctccccctctcccgcatcacacatcccaccgccgccgccaccaccaccacccgccctatacccgtatataattactcgtacccggacgccaccgccgcctgcgccatgggcgactcctcggtggccggcgcgctcgtgccgtccgtgcccaagccggagcccgcgccgtccggtgacacctccgcggcggccgcggcgactacagcggcgctggcgatgccggaggaggcgggtatgcgcgcggcgtcggcgtcgcctcaggggcctgcggaggagggggagggccccgccgatagggacctcctctgcccgatctgcatggccgtcatcaaggacgccttcctcaccgcatgcggccacagcttctgctacatgtgcatcgtcacgcacctcagcaacaagagcgactgcccctgctgcgggcattaccttaccaaggcccagctctaccccaactttctccttgacaaggttagctgcctgttctagttgcctcggttacttttatagaattcgtgtcatgtgctgcaactgcaaactgcaaactgacatttgctgaatgcaatttatgtatcgcccgctgtggccgtggtgtggcaaaaacagtaggtgttgcatgcaattccgaattctactgtttcgcaatgaaattccattcgatgggtcaacacttgcactgccacattactctgatctcgatgtggtttgtatgggatgctgctgccattgggctcgtcgattctcggtttaccccttatttacaccgcagtattagaagtttggggtagcttctgtagtacatgttcctcagtgtccgtgttgaccagttgatttcctcatacatttcagtatattgttactgatagacttttcagaattgcttccacaacttctagtgctccatgtctgttaggtagtatgcaattactatgccattcatcgctatgtgttcataaatctatgttactggtatgcacttatgctattgacttttagcattactatactcaggcccttactggtataaacatttctgtctgtctattttttatttagaaccgattgcacatatgacttgctaaatttcttacattgcatccttgtcctgtatatataggttctgaagaaaatatcagcccaacaaatagcaaaaacagcatcgccgatcgatcaatttcgatgtgcattgcaacaggtcagtgattccatgtgttactttgctagttgctactattttcaatgataaaacaaactccactcctgcattcaccacttaacaggcacattttaagtctctgcatcgatcattttccttgcatccgcttttgtgtagcgactacatttgtatatggcagcccagcagctctaataaaatcagctagtttgtttggatggataaacatatcagtttgttagtctgagatggagtttagatggataagtattggtttgttagataaggtttgtcggctgagatagagtttagatggataaacattggtttgttagatcttagataaggttggttagctaaggctgctatcttagatggataaacactgttcatccacgtgaacagtaccacgttcccccagccagcagccttaaccctaggacgataacgcccaagagttgggatcctggttctcgacctctcacccaccacttgtactacctctgtaaccctagttccaacaatctggtatcggagatgtcaggttccgacgacgtgccgccgaagtcagcaccacccaccaactccaccgttgcaacaactattgatgcgagggctgctgccaccagctcaattttctaggcggacttcatggcttttcagcagttgatggtgtagcagtttgccgccctcatcgcctccatcaacggcatgtctagtaggacaccgccaccaccgacgtctctagcttctgccaccaccagtgctgctgctttcccctatggcatgttgagctatggtggcatacccccccttcccaccatcgccgcgccatccaccaccaccaccattgttcccttcccatctgccacgacaccccttccatcaccgatcgccgccttggtgccactggcgtcaaccatgccctgacgctcgtacccatccaccacgtcgccttcccacactccccatccccgatccccagctttcccgaggatgctcttcctgcagaccatcaccctgctatgacctgcaagcgccatcaccaccaccccacttccacaaattatccttctccacgttcgacgggaaagatgacctcgtaggctggttgaaccactgcgagcatttttttcgcgaccagcgcactctcgagacagacaaggtctggctcgcctcgatccatctcaccgggactgcccaacattggtactacatgctggagcgtgacgagggctccatcccatggtagcgcttaaaggatctctgcctacaacgctttggtccccctctgcacagcaacttcttggatgaggctgcgcgtctctaatttcgttccacagttgaagactatcaagaccatttcttggctctcatctgccacgccgatccgccaccagcatcgtgccagcaggcgcaactcttcaccttcggcctaccaggacgcctccgcgtcgatgtcgagttgtgcagccatgcggacttgcagtaggccatggtcttcgcccagtcatacaaacgccactagcaaggttcggccgcccgcccacccgcctcagccctctgcgcgtctaccggttgcgcaattccctatgctggcaacgtcgtccgggtcaacggcggcggcctcagccccgacagcactgacgttcaagtgcctcaccctagcagagatggcggatcgatgccgccaggatctgtgctacaactgcgacaagccgtttgtgcgaggccatcactgccaacgtcacttctaccttgaggtgaccgctgacgacgacggggtggctgctgcggaaggtccccaacccccgtaatcctgccttccaggtcgaggacgagctgtttttggaggccggtagagctgttatgaccagcagccctaataaaagcaactagtttgtttggatggataaatatcaatttgttagtctgatatagagtttagatggataaggttggtcggctgagatagagtttagatgtataaacattggtttgttagatcttagataaggttggttagctaaggctgctatctcagctatataaatgtaccccttcaattaataaaagatcaagcaggaaagtatcttgcccgtgcttcccctacgtttctactgttcatcacgggcattgttcatccccattactgtcatctgcgtgaacagccacgtttcccccaaccagcagcgctaaccctaggacgatggcgcccaagcgccgggtattggtcctcgaccttccacccaccacctgtactacttccgtaaccctacttctaacaatatgagtagccactgacgttttgtaaagagtatagaacttaagtacatacctcttaagtgtttttatgaatcaaaacttcagtaatggaaacatcttgggattttattactttatttacatcattttcatgcaactaatctaaatattcataaagatattagtcaaaagtcaatttgtttcactgcaagtttcctaaggtaatactacctccgttcacaaatatatgacaccattgacttttttcgaaaattttgaccgctcgtcttatttaaaatatttattcaaaaatgtaaaattttaagttaagcacaaactaccttaagtgataaaacaaatcacaaaaaataaaaaataactcattattttttttgaataagacgagtggtcaattttttttgtaaaaagtcaacggtgtcatatatttatgaacggagggagtacttttctgaggctaaaaaatgttgtttcaagtggaagtttttagactaattatttgggaatacatggctatgttgcccttaggattgcagctgctgtctatgttctgtcctcttatgattcactgttcacatgatgtaccatgcattatatgattgcctcagacagcatcattgcatatgtgaatctagtagtaatataatcgcaagtttgtaacctgtaaattttggtatttcatttaagggttattgttatctgtgtttacttgctcactattagttgtatagcttcatatatccttgacatagctgttgtaatttgtgaccccgtgaaaaagctactgacaatttatcatttattcttgagatagggaaatgaaatgggggttaaagagttggatagccttatgactttgattgctgagaagaagcggcaaatggaacaacaagaatcagagacaaatatgcaaatattgctagtcttcttacactgccttagaaagcaaaagctagaagagttgaatgaggtttgtccttcgtatttttatggttctgaatttctggttctttcacacaattctaacattttaatgtcaagcaaccttcatcaatcttgctaattaaattaaatgaaatgaaagttttacctattgcatttatgttgctctttcttattctgaagtctattgttgttaatcatattcacatcttctcaacagattcaaactgatctacaatacatcaaagaggatataagttctgtggagagacatagggcagaattatatcgcacaaaagaaaggtactccatgaagctgcgcatgcttttagatgagcctactgcgcaaaaaatgtggccctctcctatagacaaagctagctgtcgctttcttcccaactctcggacaccacttagtggatcatgtccaggaactttacagaataagaagcttgatttgaaagctcaagtaagccatcaaggatttcaaaggagagatgctctaacttcttctgatcctcctaactcccctatacaatcgggtaatgttattgctaggaagaggcgagttcaagcacaggtgtgtttctcactccatgcattactacatttcttaaggcacagtttcctcccacattacacccaaaaagtaggcctcttatgtgttgcatacatgttttgaacagtatacagtacacacatggccttttacttaacttcgtgttagataaaatggcaccgatcttatgccatttattttttaaatctaattctatgaggaactttgcagttcaatgagcttcaagaatactacctgcaaagacgtcgtactggagcacaggcacgcagacaagaagaaagagatatagttgcaatgaatagagaaggctatcatgcaggtcttcaggatttccagtctgtgctaacaacgttcactcgatacaggtgtgtggttatctcttgtgtcgaggtaatatgcttttgtctttgttccattctcactagtctcaccttgtttgttgtcatgtttacttcagtcgtctacgtgtcattgcggaactaagacatggagacttgtttcactctgccaatattgtatccaggtgtgtagtttgcgagtttcttatctgtggtttcagaatgtaactagcagcagaaccagtgcagttacatggattgatatatttatgttttggtcatctgattttaaatatttatgcctacactataaattgtaaatcattatcgagcctttttgcagttctccaagagttactaccgattataattctggaggtaccaaaatcaagggctgtaaatgtttataattcgttcaccttttaatctgggcctaccttccaaaataagaagttaaatcttcacatcattactctggttaacgtgggagaatcagctccattaaagcaaacatggaagctgccttttggtgtaatgtaaacattaagttttattatacaatatatgaagtagactttcctgctctcctatgggaggatgcatgattcagcacatttatttccagttctgtgtgctagccaatcaactacttcacctttgttttattgcaaatatttggtatgggcatttgatgtttttgttatattgcagtattgaatttgatcgtgatgatgaactatttgctaccgctggagtctcgaaacgtattaaagtcttcgaattttccactgtaagtttgcttttgtcaggacatgtccatttcatagttcattgtaattgagaatagtaaggttgatttgcatcattacttaggttgttaatgaaccatcagatgtgcattgcccagttgttgaaatggctaccagatctaaacttagctgcctaagctggaacaagtactcaaaaaatattattgcaagcagtgactatgagggtatagtaactgtgtgggatgttcagacccgtcaggtatccactctctattcgacagttcattctgcaatggctgtattgtaattcaaactgaggcatatggtttctgtgtattgtgccatgctagagtgtgatggaatatgaagagcatgagaagagagcatggagtgttgatttttctcgcacagactcttcaatgctagtatctgggagtgatgattgcaaggtatttggaagttaatattgtaaaattacattctcattccgaaactaagagagaaaagcttggtgattttctcaaatgtcaagtaccaaaatcactttatgttatattatgacctgggtgggtggagcattcattttatcagacaactcattgaagaaatgatagtagttttagatggtcacaatgaatattaagttcatgaacacaacaacagatttttggtgtatgcattttcaagtaaggacaaaaaagaagaaataattacggctgttgtttatggcaggtgaaagtgtggtgcacaaatcaagaagcaagtgtgatcaatattgatatgaaagcaaatatttgctcggttaaatataatcctggatcaagcttctacgttgcagtatgttgcttcatgtctagcttatattgaatacttaatttgtttgcttttccaaccgaaatgttatttgtttacctatcaaatactacaatatttcaggtcggatctgctgatcaccatattcattactttgatttacgtaatccaagttcgcctgtccatatttttggggggcacaagaaagcagtatcatatgtgaaattcttatctaacaatgagcttgcgtctgcatcaacagatagcacattacgcttatgggatgtcaaggataactgcccggtatgctctttctgtgatagtgtgtgtatatatatatatatatatatatatatatatatatataatatatataatatataatatatatatatatatatatatatatatatatatatatatatatatatatatatatatatatatatatatatatatatatatatatatatatatatatatatatatatatatatatatatatatatatatatatatatatatatatatatatatatatatatatatatatatatatatatatatatatatatatatatatatatatatgccattcttcctctggagcttttgttgcaaaggaaagtggagttattttcgtttagaaagtactccaaactatgcagataaaagtgcttttgtttctgttatgttcctgtgttttctccagaataagcagttcactgctgtacataggactttttctttctgtaaaattgataaacaactgaatagaatatgaacttcagcacttcacatataattctcttttatactgcaccattttcttatagtgcaactggcaatgaattatctgatttggttcaacattacatgcccaatttgaaatagtgcagctacgaacataatttttggatgaccattttgttataacaacattgtgttttttcaggtacggacattcagaggacacaaaaatgaaaagaactttgttggcttgtctgtgaacaatgaatatattgcttgtggaagtgagacaaatgaggtttttgtttatcacaaggtaatggcaagcttctgtcctggtcatgttcccatgcagcatgcattgttatgatgtgtgactcaatataatcaatcagatgggttcctaactctacactgattgcaggctatctcgaaaccggcagcaagccatagatttgtatcttctgacctggatgatgccgatgatgatcctggttcttatttcattagtgctgtctgctggaagagtgatagccctacgatgttaactgctaacagtcaggggaccataaaagttcttgtacttgctccttgatgttatggagggcgttcaagaggttcacagtactgtccagttgtttcctttcgtgtcattatattcccccaaaattgggaacgggggcataattgatctccggttagggaatgaagttttgcagatggtcagctgacgtagggttttgaggtatcagaatgtgcatagtcatgtttatgttgtataggtgtaattgtgtaaagcagccaagttattggttacaagtgtaacacgagaaatacacattaataaaaaaaaaacctccagctcgtttgtacagagattgtgcttgaacccagaaccttatgtggtaattgcgattggtaatatatctacctgatatgatcaaacggatgccgtaatcagcaattgtttctttcaggtgtgtttttttcctgctgtttatggggtaattttcaagaattttttttaaaactttctggcgtgttgcttgaagaattatgttgtgtatatttaaaccaggcgatcttacaaagtggacgcacaccatatattgcaattctctacctgtatgcagacgtagtattttatctgtatgtgcccaggttctttctgctactagacgcctagagtggtacagtactaaagaaaactaggatcgtgctctttttcttacgaaacaatagtagggtcagcgcgtattagctaaaactagatcggttccacagaagaaatctaataaaaaggtaccaaccacttcctgagatagttttgcctttgcacctcacgtcacaggtcggagtcggactggcgcatctcagtcaccagctgcacgggggggacagtgaatgcgccggctgccgcatcgcagcttttgttcgggctgccgagtcgcattccgtccggtccggtgagcaagaggctcgttggcccttggagcgcccaacggcctatacggtttccgcaggcgcagccgatcgagcgagcgtcgcattgcagcgcgttacccgtgcacgcacagcacagatgcactgcacggcctgtcgaccgcgcctgcccacccatgccgcgtccccgatgcggcggaaggcgggcgagttgcgacggggccgtgccgctaccgcccgcggacgaaggaggcagcgtgagacatgccgacgtgagcgccttacgtttgtttattcgtccgcgcaccgggatagaggccacttgtcgggtgtcggctagtcgacttcacgggatgtacctcgcgatcagagtcgtccatgttatgaactgtaaactgctgatcgagtgatccacgttcaaatccaag

SEQ ID NO: 650 - protein, 693 aa, Zea mays
MGDSSVAGALVPSVPKPEPAPSGDTSAAAAATTAALAMPEEAGMRAASASPQGPAEEGEGPADRDLLCPICMAVIKDAFLTACGHSFCYMCIVTHLSNKSDCPCCGHYLTKAQLYPNFLLDKVLKKISAQQIAKTASPIDQFRCALQQGNEMGVKELDSLMTLIAEKKRQMEQQESETNMQILLVFLHCLRKQKLEELNEIQTDLQYIKEDISSVERHRAELYRTKERYSMKLRMLLDEPTAQKMWPSSIDKASCRFLPNSRTPLSGSCPGTLQNKKLDLKAQVSHQGFQRRDALTSSDPPNSPIQSGNVIARKRRVQAQFNELQEYYLQRRRTGAQARRQEERDIVAMNREGYHAGLQDFQSVLTTFTRYSRLRVIAELRHGDLFHSANIVSSIEFDRDDELFATAGVSKRIKVFEFSTVVNEPSDVHCPVVEMATRSKLSCLSWNKYSKNIIASSDYEGIVTVWDVQTRQSVMEYEEHEKRAWSVDFSRTDSSMLVSGSDDCKVKVWCTNQEASVINIDMKANICSVKYNPGSSFYVAVGSADHHIHYFDLRNPSSPVHIFGGHKKAVSYVKFLSNNELASASTDSTLRLWDVKDNCPVRTFRGHKNEKNFVGLSVNNEYIACGSETNEVFVYHKAISKPAASHRFVSSDPDDADDDPGSYFISAVCWKSDSPTMLTANSQGTIKVLVLAP

SEQ ID NO: 651 - DNA, 8127 bp, Zea mays
aaactgatttatgaaaataagtttggtggagatgtttgaaactcaatttctaagaaatcggtttctagttttttctatacacaattatcaacatatcttttctctatttttataagtggtgtcaatagatgtaaattctatgaaatcaatgagagcgtgatgcaattaaacaaacacaagctagttttagttagaggagagtagcttcttggtttttaagaacttgagaatttattttctataaatcagtttttttaaaattatgtgcttccaaacaacaccataaatataaatagaaatcatagcaacgtactagcaataagtagaaactatagtaacctacaaacactttactatttaacttatagcaaatgtaaatggatttatacacgggaacggaggagtacccgacgcaagactggtcattggatctttaaaaaaaagaagaataaataaagaaaaaggaagcacaatccccgtcttcagcggttagctacaagcctacaaaggcgaaagtatccgcatccacttcaggccccagcgcgagcgcaatccattccagacctgaacccctgccgagccccgatcccctagtaccatccccatcacagccatcgtcatcggcgcatcgcctcgcgcgcaatatccttggctccacgccccccactttacatccccacttctttattggaacaattggatctataccattaaaagatccaaactttagatatataccatggaccccacgtgttattaactcatgtggacccacatgtaagtgagatagtaatggtatagatctaaattggtgatcttttaatggtatggatccaaatttttcttctttattttatcctcgtgaatcaatgagcgcagcgaggaacggtgaagcaaagctaaggtatcggacgaacacatagggggcgagcgagccgactgacgagcacaagaccggcggacggggccgcctaatccagtgagagctcccccaagcgccatggcgtcggacagtcgcccccccaagcgctccccctccgcgcgacgcgtggcgccgcgtcacgcgcaccaccaccactcgcagtcgtcgggcgggagcacgtcccgcgcaggcgcgggaggaggtggcgggggcgctgcggccacggagtcggtctccaaggccgtcgctcagtacaacctagacgcgcggctccacgcggtgttcgagcagtcgggcgcgtcgggccgcagcttcgactactcccagtcgctgcgcgcgccgcccacgccgtcctccgagcagcagatcgccgcctacctctcacgcatccagcgcggcggccacatccagcccttgggctgcacgctcgccgtcgccgacgactcctccttccgcctcctcgccttctctgagaacgccgccgacctgctcgacctgtcgccgcaccactccgttccctcgctcgactccgtggcgctgccccctgtttcccttggtgccgacgcacgcctctacttctccccctcgtccgcggtcctgctggagcgcgccttcgccgcgcgcgagatatcgctgctcaacccgctatggatccactccagggcctcctccaagccgttctacgccatcctccaccgcatcgacgtcggcgtcgtcatcgacctcgagcccgcacgcaccgaggaccccgctctctccatcgccggcgcagtccagtcccagaaactcgcggtccgcgccatctcccgcctccaggcgctacccggcggggacgtcaagctcctatgcgacacagtcgtggagcatgttcgcgagctcactggttacgaccgtgtcatggtgtacaagttccatgaagacgagcacggggaagttgtcgcagagagccggcgcgataaccttgagccttacctcggattgcattatcccgccacagatatcccccaggcgtcgcggttcctgttccagcagaaccgcgtgcgaatgatcgcagactgccatgccatcccggtgagagtcatacaagatcctgggctgtcgcagcagctgtgtttggtaggctccacgctacgcgctccgcacgggtgccatgcacagtacatggcgaacatggggtcaattgcgtcgcttgttatggcagtcatcattagcagtggtggtgacgacgagcgaacaggtcggggtgccatctcctcatcaatgaagttgtgggggttagtggtgtgccaccatacatcaccacggtgtatcccttttccattgaggtatgcttgcgagtttctcatgcaggcatttgggctgcagctcaacatggagttgcagcttgcgcaccagctgtcagagaagcacattttgcgaactcagacgctattgtgtgacatgctactgcgagattcaccagctggcatcatcacgcagagccccagcgtcatggaccttgtgaagtgcgatggggctgcactgtattatcgtgggaagtactacccattgggtgtcactcccaccgagtctcagattaaggatattatcgagtggttgacggtgtgtcatggggactcaacagggctcagcacagatagccttgctgatgcaggctaccttggtgctgttgcattaggggatgctgtgtgtggaatggcggtggcttatataacaccaagtgattacttgttttggtttaggtcacacacagctaaagagatcaaatggggtggcgcaaaacatcaccctgaggataaggatgatggtcagaggatgcacccacggtcatcattcaaggcatttcttgaagtggttaaaagcagaagcctgtcctgggagaatgcagaaatggacgcaatacattccttgcagctcatattgcgtgactccttcagagatgctgcagagggcactagcaactcaaaagccattgtcaatggacaacgtcaacttggggagctagaattgcgggggataaatgagcttagctctgtagcaagagagatggttcgattgatagagacagcaacagtacccatatttgcagtagatactgatggatgcataaatgggtggaatgcaaagattgccgagttgacaggcctttcagttgaggaggcaatgggcaaatctctggtaaatgatcttatcttcaaggaatgtgatgatatagtcgaaaagctactctcgcgagctttaagaggtattccattttcatttcttatatggatgctattgcttttatattatgttttgtgagaagtgctgttgaggaaaatattatctgttcttggttgtatctcttaaggtatatgacataaacaaaaagtgtatggacacgatgtatacatgtttattacaccaagtattgaaatttgtggtatatatactcctggaaaatgtatatttgaaggagctgagcctaggtcagttggttgatagtgtggatgtacgcctagacccacatcccccaagttcaagtcattgtcgaggctaatttgtgcatgcatcttcttaatttaaaagccctcctatgtcagtcaagttttttttaaatagatatacccagtttcttagccacacttctttttgtgcacaattatatagaaaatggagacaaactagcaactaccgtcaaatttactcaatcattttcacagtgttttttagaaactggtgcttataattagcagataggaatgctcatgtgtgaaaagtaagcatatgagacttataccagaggttgtgttagctactcacaggagtacattgtttatcccccaggactattttgacctacttaccaatgcatgtagctaagctaagctagctttgatggatgttcaactggggagtgctaatttgtgaagttgcttcccatacaggtgaggaagacaaaaatgtggagataaagctgaagacatttgggtcagagcaatctaagggtgcaatatttgttattgtcaatgcttgttccagcagagattacacacaaaatattgttggtgtctgttttgttggacaagatgttacaggacaaaaggtggtcatggataaatttatcaacatacaaggggactacaaagctattgtacacaatcctaatcctctgctacccccaattttcgcatcagatgagaacacttcttgttcagaatggaacacagccatggaaaaacttacaggatggtctagagaggaagttgtcggtaagtttcttattggagaagtgtttggaaattgttgccgactcaagggcccagatgcattgacaaagttcatggttgtcattcacaatgctatagaaggacatgattctgagaagttccctttttcatttttcgacaagaatggaaagtatgtgcaggccttattgacggccaacacaaggagcaaaatggatggtaaatctattggagccttttgtttcttgcagattgcaagcgctgaaatacagcaggcatttgagattcagagacaacaagaaaagaagtgttatgcaaggatgaaagaattggcctatatttgccaggagataaagaatcctcttagtggcatccggtttaccaactctctattgcagatgactgatttaaatgatgaccagaggcagttccttgaaactagctctgcttgtgagaaacagatgtccaagattgttaaggatgccagtctcaaaagtattgaggatgggtcagcattctaagctttacccttatgctcgcccattctcgaatatttgcattgaatatttacatttgatcattcatattcgtttaacttgagcctggagtagccttaatctaaattttagttggtgctaatcttgactggtagatacagaattgaagtaggaattaaagttcatcagtcattagactgtcacagtttgttctactgtctttgcagttctttaaataaatatccccttgaacctaagttattgcctacattagacgaagatccttgttttctgtactaccctttaagacacttttgttattaccccttatggtacttgtgctcttgctcggacgatatttgaaactgtgtaagatcagcaacatttgccaacatatattttagttatatgttgcaaatatgaaggcagttcagatttctgtactttcaaagatgcattggtgttttagaagcttcagcttatcctactgtagtactgtgcttaaaagactcctatgggtttccatctttttattggaaacgaagtaccatattattgtactgtacagtgactggcgtgcgtctggctgattgtgtacatcattatggttgtaactgtctaatggttgacgatatggctactaaaccaggaccaagccaaaatttgatggttttcacagttcccagtggaatttggtgaatctggtgtctttttctctatttttttcaagtatagctaatagcgtggatattaaacaagtacatataataatgcctgcatatgctgaatcgttgaaattgtgtaaaaatgtcaacttctgtacaaacaaaaaacagtgcatagtgggtgttttctgcttaccaatgttagcatactgattactaccaggattgtgaacctttgtgcttcaaatgctatgtcatgattttttgttagaattaaaggaatatccctgtgaactgataaccttaccacattttaggaggatgtcaccaaagtttaagcagctttgtctaacatatctctgcctgtagttttgtttgaggagcttcataaattatttggagatgctgtatttcatttgcttgcaccgaaactcaaatcttttctggttgatttttatacacttgatcaggtccatctgtcttatctatcaataatgactgtgcatagattttaccccagaaaatggctaactttttttttgcaccacgggcgaactgaaaattacaaaagtgactaactttggcttgttcaacataatacttgattctcatctggtatagctacttacacaatcttatagtattactgtcactttatttgcttgacttaatttcatttaggttcattggttcagtgtttacactgtagataatagcatttttcacttctttgtaacctaagacataagtttgaatgttgctgtattttccacaattggtaattgaaaatttgttgatctgtttctctttatgtaacagctctttggtgcttgagaaaagtgagttttctcttggagacgttatgaatgctgttgtcagccaaacaatgtcattgttgagggagagggatttacaacttattcgagatatccctgatgaaatcaaggatgcatcagcatatggtgatcaatttagaatccaacaagttttggctgacttcttgctaagcatggcacagtctgctccatccgagaatggctgggtagaaatacaagtcagaccaaatgtaaaacagaattatgacggaacagatacagagcttttcatcttcaggttagcagcttgctctttttctattataatttgtctaaaatatttttttgtttcttcaaggaatatgtgttgttgaattttggtagaagacaagtaacatgaattacttcaacgttgagctggttgttcacatgtggtgtgatacctttcaaatatacgtccatgataattttgacagaattttcctgtttgcatcatgctgtatttttctttttcttgtgttgactcaatttctttaacttagcgtactggttgtgggatttgatggtaacataaatagtatgagagttgcttgggaattagatgattctggagaatcagcttccaaatgttaatgacaacggaaaactcaatgtaggggcttcccctacagtatttctcaaaaaagaaaaaaaacggaaactcaatgcctctattgggacttggcagtaccaattaagtgatttccttttgttttttttatatctgtaggtttgcctgccctggtgagggcctccccgctgacattgtccaggatatgttcagcaattcccaatggtcaacccaagaaggcgtaggactaagcacatgcaggaaaatcctcaaattgatgggcggcgaggtccaatacatcagggagtcagagcggagtttcttcctcatcgtccttgagctgccccaacctcgtctagcagctggtagagaaaatcagctgatatgttaagatctgcgctgacaccacctaacttctaggtcgattaggtaacttaggtggtgtttgtttgggattataatctgcctaaattatataatcagtgttagttcaaaataaggtagattatataatctggtcagattataatcccaaacaaatagacccttagctccctgataagagggtgcctaatttacaagaagcctggaaacaaatgaatgctgccatggcaattcaatggttgagtgttgatgaggaggctgtttttcggtgcgccgctgtaagtttgggtatccatgctgtggtttcaagatcagagttcatggcagatagttatgtacacaggcggcaaatttggttcttagcttaggttgatgaccagtttcacttagtacatcttatatgtatactaggtggatgcccgtgcgttgcaacgggaagataaaatatcacgataactcatgtacaaatatgttataatattatagaaaaaggttacaaatgtgttataatgtttaggaaagaaaacaaagtcacagcctgtgcattcactgggacctgataacattaggtggactaacctctccacatgacgaaaaggcaatagagttgcaattgcaagcacacaaaaaagtggtctgcacaagaaagtgtatatcatggcagatgttcttcggacttggaaaataatacacgagaaaaagaagacatggaaaatatgtagttctacacgcatattgttgatgcaccatcggtattgcacgaatcaacttgtcttacaatttctaataatagtcaaatatgtcgacaatcgtacattaatctaatctttttttgcgatactgataagtcgttgttgtatgtttggagggatagcatagcggcatgaattctcctcgtaacttaatagatcaattacaaagtttcttcgaagaatctttgtatcctacacacaaagacataagagaacagtacgtcaaatttatattatgtaactgaaatgtatgtt

SEQ ID NO: 652 - protein, 1166 aa, Zea mays
MASDSRPPKRSPSARRVAPRHAHHHHSQSSGGSTSRAGAGGGGGGAAATESVSKAVAQYNLDARLHAVFEQSGASGRSFDYSQSLRAPPTPSSEQQIAAYLSRIQRGGHIQPLGCTLAVADDSSFRLLAFSENAADLLDLSPHHSVPSLDSVALPPVSLGADARLYFSPSSAVLLERAFAAREISLLNPLWIHSRASSKPFYAILHRIDVGVVIDLEPARTEDPALSIAGAVQSQKLAVRAISRLQALPGGDVKLLCDTVVEHVRELTGYDRVMVYKFHEDEHGEVVAESRRDNLEPYLGLHYPATDIPQASRFLFQQNRVRMIADCHAIPVRVIQDPGLSQQLCLVGSTLRAPHGCHAQYMANMGSIASLVMAVIISSGGDDERTGRGAISSSMKLWGLVVCHHTSPRCIPFPLRYACEFLMQAFGLQLNMELQLAHQLSEKHILRTQTLLCDMLLRDSPAGIITQSPSVMDLVKCDGAALYYRGKYYPLGVTPTESQIKDIIEWLTVCHGDSTGLSTDSLADAGYLGAVALGDAVCGMAVAYITPSDYLFWFRSHTAKEIKWGGAKHHPEDKDDGQRMHPRSSFKAFLEVVKSRSLSWENAEMDAIHSLQLILRDSFRDAAEGTSNSKAIVNGQRQLGELELRGINELSSVAREMVRLIETATVPIFAVDTDGCINGWNAKIAELTGLSVEEAMGKSLVNDLIFKECDDIVEKLLSRALRGEEDKNVEIKLKTFGSEQSKGAIFVIVNACSSRDYTQNIVGVCFVGQDVTGQKVVMDKFINIQGDYKAIVHNPNPLLPPIFASDENTSCSEWNTAMEKLTGWSREEVVGKFLIGEVFGNCCRLKGPDALTKFMVVIHNAIEGHDSEKFPFSFFDKNGKYVQALLTANTRSKMDGKSIGAFCFLQIASAEIQQAFEIQRQQEKKCYARMKELAYICQEIKNPLSGIRFTNSLLQMTDLNDDQRQFLETSSACEKQMSKIVKDASLKSIEDGSLVLEKSEFSLGDVMNAVVSQTMSLLRERDLQLIRDIPDEIKDASAYGDQFRIQQVLADFLLSMAQSAPSENGWVEIQVRPNVKQNYDGTDTELFIFRFACPGEGLPADIVQDMFSNSQWSTQEGVGLSTCRKILKLMGGEVQYIRESERSFFLIVLELPQPRLAAGRENQLIC

SEQ ID NO: 653 - DNA, 13240 bp, Zea mays
aaccgggtgccaaaacctctccggctgccacgatgacatgtatttagggcgctagctctcctccgctagacacgtagcaccctgctacaccccccattgtacacctggatcctctccttacgcctataaaaggaaggaccagggccctcttacagagggttggccgcgcggggaagaggacgggacaggcgctcgcgtgaggccgctcgctccccctcccgcgtggacgcttgtaaccccctactgcaagcgcacccgacctgggcgcgggacaaacacgaaggccgcgggatttccatctctctctcgcttcggctgccttttcttccccccttcgcgctccatctcgcgccgacccatcttgactggggcacgcggcgacattttcactcgtcggcccagggacccccggtctcgaaacgccgacagtaagaaaatgagaatcccttaggatcagtttgactttgagaaccttattttcccaaaaaaatagtacattttttatttggaaaaaaacttttagaaaaatgaagttattaaactagcccttaataaatagatttgtcaaactagctaaagaaataaataagaatatactcctagttttcagcgcctaaataaaagctgcaaaggtaagagcatccgtatccacttcagctttcaagtttggagttcgtcgtcgtccccagcgtgactgcgcgagtgctatccattccaaacctgaaaccactgcggcccaacccggcaaccccgatccccacttccccagtaccatccctatcccagccacgccatcgtcatcgccttgcgcgcaatatccttggctccacgccccagtaagcgaccagtgacagtgagagcggtgaagcaaaccaaagcaaagctatcggaagaacctcagtcgagggggcgagcgagccgacgagacgactgacgagcgcacaagaccggacggggccgcctaatccagagagagccccaggtctcccccaaccccgccatggcgtcgggcagccgcgccacgcccacgcgctccccctcctccgcgcggcccgaggcgccgcgtcacgcgcaccaccaccaccactcccagtcgtcgggcgggagcacgtcccgcgcgggcgggggagccgcggccacggagtcggtctccaaggccgtcgcccagtacaccctagacgcgcgcctacacgcggtgttcgagcaatcgggcgcgtcgggccgcagcttcgactactcccaatcgctgcgcgcgccgcccacgccgtcctccgagcagcagatcgccgcctacctctcccgcatccagcgcggcggccacatccagcccttcggctgcacgctcgccgtcgccgacgactcctccttccgcctcctcgccttctccgagaactcccccgacctgctcgacctgtcgcctcaccactccgttccctcgctggactcctctgcgccgccccacgtttccctgggtgccgacgcgcgcctcctcttctccccctcgtccgcggtcctcctagagcgcgccttcgccgcgcgcgagatctcgctgctcaacccgatatggatccactccagggtctcctccaagccgttctacgccatcctccaccgcatcgacgtcggcgtcgtcatcgacctcgagcccgcccgcaccgaggaccccgctctctccatcgccggtgcagtccagtcccagaaactggcggtccgcgccatctcccgcctccaggcgctacccggcggggacgtcaagcttctctgcgacacagtcgtggagcatgttcgcgagctcacgggttatgaccgtgtcatggtgtacaggttccatgaagacgagcacggggaagttgtcgccgagagccggcgcgacaaccttgagccttacctcggattgcattatcccgccacagatatcccccaggcgtcgcgcttcctgttccggcagaaccgcgtgcgaatgattgccgattgccatgccaccccggtgagagttattcaagatcctgggctgtcgcagcctctgtgtttggtaggctccacgctacgcgctccacacgggtgtcatgcacagtacatggcgaacatggggtcaattgcgtcgcttgttatggcagtcatcattagcagtggcggtgacgatgagcaaacaggtcggggtggcatctcgtcggcaatgaagttgtgggggttagtggtgtgccaccatacatcaccacggtgtatcccttttccattgaggtatgcttgcgagtttctcatgcaggcatttgggttgcagctcaacatggagttgcagcttgcgcaccagctgtcagagaagcacattctgcgaactcagacgctattgtgtgacatgctactacgagattcaccaactggcatcgtcacgcagagccccagcatcatggaccttgtgaagtgcgacggggctgcactgtattatcatgggaaatactatccattgggtgtcactcccactgagtctcagattaaggatatcatcgagtggttgacggtgtttcatggggactcaacagggctcagcacagatagcctggctgatgcaggctaccttggtgctgctgcactaggggaggctgtgtgtggaatggcggtggcttatattacaccgagtgattacttgttttggtttcggtcacacacagctaaagagatcaaatggggtggcgcaaagcatcaccctgaggataaggatgatggtcagaggatgcacccacggtcgtcattcaaggcatttcttgaagtggttaaaagcagaagcctgccatgggagaatgcagaaatggacgcaatacattccttgcagctcatattgcgtgactccttcagggatgctgcagagggcaccaacaactcaaaagccattgtcaatggacaagttcagcttcgggagctagaattgcgggggataaatgagcttagttccgtagcaagagagatggttcggttgatagagacagcaacagtacccatatttgcagtagatactgatgggtgtataaatggttggaatgcaaagattgctgagttgacagggctttcagttgaggaggcaatgggcaaatctctggtaaatgatcttatcttcaaggaatctgaggcgacagttgaaaaactactctcacgagctttaagaggtatttccatttctgtttcttatatggatgctattgcctttatactacgtttcatgaaaactgcggagtgctgttgaggaaaatattatgttcttggttgtatctcttaaggtatatggcataacagaagcttatggacatgatgtacacatgtttattagaccaaatatggaaatgtgtggtaatatactcctggaaaatggatatttgaaggagctgagcctatctcagtttgttgacagtgtggatgtatgcctagacccagacccccaagttcaagtccttgtcgaggcgatttttttgcatatttcttctaattaaaaagcccttctatgttggtcaaggttttttaatagatatactcagtttcttaggcggacttctttttgtgcacaaatatatagaaaatgggggatcaactagagactaccaacaaattcattcaaccatttctagagtatttttagaacctggtgcttataactagcagacatgaatactcattagtcatatgtgaaaagtaagcatatgaaacttataaaaaaggtcatgttagttgttgaagtgtatgagtggattaactatcttttcccatcagcttaagcttttgggttcaactggttagcgcgtccactccaacatggtaccaaagacaaaggtctcgaattcgaattctggcaaaggctttatttatgcctccacccatttatttccacgtttgcgcccctctctctctctctctggctgcatttgcgcctttctctctggctacacgtaagtgggggtgttgaagtgtataagtggattgactaccttctcccatcagcttaagcttttgggttgaactgtttagtgcgttcactctaacattagctactcacaggagtacaatgtttctccccaggctgtttgaactattttaatgtacttcccaatgcatgtagctaagctatgttagctttaatggatgtgagattggagagtgctaatttgtgaagttgcttcccatacaggtgaggaagacaaaaatgtggagataaagttgaagacatttgggtcagagcaatctaagggaccaatatttgttgttgtcaatgcttgttctagtagagattacacacaaaatattgttggtgtctgttttgttggacaagatgtcacaggacaaaaggtggtcatggataaatttgttaacatacaaggggactacaaagctattgtacacaatcctaatcctctgataccaccaatttttgcatcagatgagaacacttcttgttcagaatggaatacagccatggaaaaacttacaggatggtcgagaggtgaagttgttggtaagtttcttattggagaggtgtttggaaattgttgtcgactcaagggcccagatgcattgacaaaattcatggttattattcacaacgctataggaggacaggattatgagaagttccctttttcattttttgacaagaatggaaagtatgtgcaggccttattgaccgccaatacaaggagcaaaatggatggtaaatccattggagccttttgtttcctgcagattgcaagcactgaaatacagcaagcctttgagattcagagacaacaagaaaagaagtgttacgcaaggatgaaagaattggcctatatttgccaggagataaagaatcctcttagtggcatccgatttaccaactctctgttgcagatgactgatttaaatgatgaccagaggcagttccttgaaactagctctgcttgtgagaaacagatgtccaagattgttaaggacgccagtctccaaagtatcgaggacgggtcagcattctgtttaccccttctactcacacattctctaatatttgcattgaatatttacatttgatcattcatatttgtttaacttgaacctgaagtagccttaatctaaattttgatggtcgctaatcttgactggtagaggtccaaaatcggagtaggaattagagaagttcatcagtcattagactaccacagttcattctactgtctttgcagttatttaaataaatttccccttgcacctaagttattgccaacattagatgaagatccttgtttttttgtactaccctttaagacatctttgttattatccctcatggcatttgtgtgtgtagaagggagagaattgttgtattgataggagatggggtacatatatatagggactcaaccctaaccctaatgggccggcagcccaacagtggtgccggcccacacacacagtctaacatccccacgtagtcgcaacggggacaccacacacgatgagactggagtagaggccgaaggtaggagccgacgggttgaaatccccccgcagtcgcaacgtcgtgatggtgcgaatgttgcggctggagtagagaccggtgtgtgctccaagaagacgatagcctctagatgccgaggtagccgaagtcgaggtggtcgcggtcgggagacacgcagcagaagcctgatcttcgggaggggtagacgttcgagcatcaacgatcggcagggcgacacaacaaaaggacaccggcaggccgacacaacaaaaggacaccggcaggccgaccttcctgcttctttgatcgtccgggcgtcaaggagccccgccagggaggccgacagcagcgcacgcgtctgcaccggtcatggtgtccgcgcccgcggcagaaaagaaggggaatgtcggatccggccgggaaggccacgacagcgacggatccggatgggaagacgcaatccagccaaagggatggcggatcgagccgagaaggccgcaacaacgtggatccggtcgggaaggccgcgaaagcgatagatccaacaagggcgatgaaggggtgggcagcgcggcgggtccagctgggcaggggcctgcgccggacctggcaaggggtgttgacgacggcgatgaaagaagctcgatgaatttgcgctgttgggtgtcggtgcgggcagttaggaggtcgccagcgcgatgaggaggggctgcacgggcgagggtgtcagcgggggacgcagcggagagggagccggcggtggtgggcagagggggggctgcgcgacggcgttggagtggtgctgggcaccggggcacgcaggaggggcgcgccatgggagcaaggagcacgccggcgcgcgcgcaggagggcggctgccacactggctggtggagggccaccggtggcggatctgggccgcggcttgtggacgcagccgcgacgctggttggcctgcaggcgcttgagcgaggccgcgagcgcgttggacagcgtcgggctggccgattgctgctggaggagccgcgccacgaaggaggttgcgggcgtacacggtgcaccagtcgctcaccgcggaggcggtcgcggcgctgcagctcttgttgggcctggcgcgccgcgtcggggccgccgtgccagggccgcccccggccggaggagccgcgccatggctgcgcccgagcccgcttggagacgcggcggcgccgacggccgcggacagggagcgacgagagatggtggccggctggaggttgaagacgaacaaggaggagtggagcttgggcgcttgctgtgattaccggtgaggtggagcagggagtgtcgggctccatggcaaggggctccgttcagccaccatgggaaggagtccgacttggaggtggtggccgaggagggtgttggagctcacatgtggttgtggagctgggaggccgcccccgggagggaaggtagggcctcccgggggcagcgatggcaggcggcggctgtgggggtgggagggagacgccggcggctgtgggaggtgggaggaaaaccctaaacctagtctgataccatgtagaagggagagaattgttgtattgataggagatgaggtacatatatatatagggactcaaccttaaccctaatgggccgacagcccaacgttggtgacggcccacacacacagtctaacagtgtggactacttctcttgctcagtcgatatctaaaactgtgtaagatcagcaacatttgccaacatatactgtagctttatgttgcaaatatgaaggcactccatattgttgtacttcaaaagatgcattggtgttttagaaggctcagcatattctactgtagcactgtgcttaaagactcctacgggtttggaaacctctttttatttgaaaggaagtaccataccatcataatgtacagtgactggcatgcgtctggcttattatatacatcgttatggttgtaattatctaatggttgataatatgtctactaaaccaggaccaagccagaatttgatggtttccacagttctgagtagaatttggtgtcttcgttttttcaaggatagcatgaatattacacaagtacattgaataactactatatatattgaataaattatgttaaaaaagccaacttctgtaagaaaaacactgcatagtgaggggttttctgcttaccaaatacagcatactgattactaccaggactgtgaacctttgtgctttaaatgctatatcattctaaagggaatagcctaagtccaagcagctttggctaacatgcctctgcctgtagttttctatgaggagcttcataaattatttggagatgctgtatttcatttgcttgcatgggaactcaaatcacttgtggttgatttttatacacttgatcaggtctatctgtcttatacactcgttgtatctttgatggagtggctcctagcctttccttcatcctagtgcagattgatgatgaaagaagatcatgggaattagctggagcgaggggtctctcctacttggcagcacctcttcttgaggccccccccctcctttgatctttagtgggtttgtttgagtgttgtctgtatggatccttttatttatgcgtgttttggcctccatagggaggtctttctgtaccccaggtcttctttagaccttctacttcttaatatattctaaagcgcagttctcctgcgcttccgagaaaaaaaaagtgtctaaaggcatgttcaacagaatagttgcttctcatttggctaagtctaaacacaaacttactaagccatcacttggaatagctacttacacaatcttattgtattactgtcacattatttgcttgacctaatttgatttaggctgagtgcttagacagtagcattttatcacttttttgtaacctaagacataagtttgaatgcttctgttatttccacaattgattaactgaaaatttcttgatttgtctctctttatgtaacagctctttggtgcttgagcaaagtgagttttctcttggagacgttatgaatgctgttgtcagccaagcaatgttattgttgagagagagggatttacaacttattcgggacatccctgatgaaatcaaggatgcgtcagcgtatggtgatcaatgtagaattcaacaagttttggctgacttcttgctaagcatggtgcggtctgctccatccgagaatggttgggtagaaatacaagtcagaccaaatgtaaaacagaattctgatggaacaaatacagaacttttcatattcaggttagctgctttgctcttttattataattcgtcacaaaatgtttttttgtttcttcaaggaatatgtgttgttgaattttggtagaagacaagtaatttgaattacttcaaccttaagctggctggccgcttatgtggtgtgatagctctcaaatatacgtctgagaattttgacagaattttcctgtttgcatcgtgctgtattttttgttttcttatgttaactcaatttctttaacttagtgtactttttggttgtgggatttgatggtaatatagacggtatcggaaggcaacagtgatggaaaatatagaaacgaacactgatattatttggttgagctgcgcattggatttatgctgcagcagtggagagacaccgccagttctttccatggaggtcacctccatccttgttgtcaagtcgtcagagggagaaagcaagcgcaaggatagtcacttgtggatgagaacggtggctcacatgtgacttcctcgctagctagctgacactacatgtcattaggaagatgcatgagagacgtgaggaagatgcctactacgcgttatgcaacttgcctttgctcgagagttgtgaggaagatgcagctgggtcgctgctacacgcaggtggttggtctttatagccgagggagatgccggggggggggggggggggggggggtgggtggtttggggggggggggggggggggggggggggggggggggggtggggcgggggggggttgggggggggttgtagcatccagtgatcagtgatgtagtccgtggagcggatgatgaaatcaacgccgtaaccagatactataacgctcgatcaggagttgtaatgaatttgtataggctgtgatctgattccatggtaagtgattgtgtcccatgccaaatcaaacacgtataacggtatcagttggttctgtaatcagctgtcggactaaaaactgtgaaccaaacaacatctaagttgtatagggtgccctagatcacatgtagtttgcactgaagtgaagaatgagaaaaaaatggctttgctgaggcatcaagcacggcaggcggcggcttgccgtcttcgtgctgcgacatgtggcttcccgacgcggcctcaagcacggcaagcggcgacgcgactgcaggctgtggtccgctgttccctggcacaacgacttgtatcgatattgcgcgttgaataacacgcgacacatggggcggcagggccttcagcagggttgaccgatcctccactccagttcactgtcctgatccatagccatgtggacagcaagaacacgtctagttgggtggcgctgtctgcactggaactcgcaacagctcaggttgtaggactggtgagctgccacgtcttggcctttgcatcctggacgaggttgttcccatgggatccaggggaccaaccttggcatatgttaggttttttatttgtttgcaaataaattaaagtcgaaatgtaaaaggcttctagttagggttgtctttcacgtgtagatcaagttagacagcaaggctgttgccatgcacccattacagctcgaggatgagttgtcttcgaatgtgggggaatgtcatagggcggcagcccagggcatatggaggcccatagggattggcttagagttaggattagtggataaagattagattatataagatttagttagttacttgagattggattagataagatttagttacttgggattagattagataagattgagttagttacttgggattagattagataagattaagttagttacctgggggctaagtcttcctatctatataaggatgggatgtaccctcttaagggggaatcaattaatgaagaagaattactcccatatctctctaatagtagtccccctcctaagctgactgactccgaccggctatctttccggcgatgtttatccccctatgaactaggatccataacaccatcccactaatatatatttttgattcctctcatatgatgtaccaagcactttttttgctacagaacaatgtttagattaacataggcaaatgcaaatctggatctatttgattagtacttttggatgtctattagataccaaaactgctgcctgccatagagcatcggtgccagataccaaaactgctgcctgccatagatcattggattaaatgcatttttgagggttgcaattaagtatgtctttaagtctcagagctgctgatgaggaaagaagaagatgggaagtagctggtgtaaaaggcctcgctcatttggctgcacccttggtagagacttaggaagatttgagtagtttgttttttgatccccttatggatctatatttgtatgcctgtttctggcctccgtaaggaggctcttctgtagacctttgtttttttctttcttctgcttaatatataatgggacgtagttttcctgcgcattcgagaaaataaaaagctgagaatcgacgaccttacctattgaagttcaaaactgtcctattaaatggtgccatggactgcaaatatgtaatcatctgttttttaagatgaattttactattttattgtcctggcttagcttgagcgaaagtgattgtcttttctgcaactcgtattatttcaacaacctacattcattacattgtgcattagatgattctgaagaatcagcttccaaatgttaatgacaatggaaaactcaatgcttctattgggaattgggagtaccaataagtgatttccttttgatatttgtatgtctataggtttgcctgccctggtgagggcctccctgctgacgtcgtccaggatatgttcagcaattcccaatggtcaacacaagaaggcgtaggactaagcacatgcaggaagatcctcaaattgatgggtggcgaggtccaatacatcagagagtcagagcggagtttcttcctcatcgtcctcgagcagccccaacctcgtccagcagctggtagagaaatcgtctgatatgttaagatccgtgctgaccccacctaactttctcggccgattacataacttagccccctgataagagggtgcctaatttacgagaagcctggaaacaaatcaaagctgccatggcaattcaatgactgaagtgttgttgatgaggctgttttcagtgcaccgctatccatggccatgctgtggtttcaagaccagagttggcggatagttacgtacacaggcggcaaatgtgtctcttagccgctgtttaagtgcaccgctgtaagtttgggtgtccatgtccatgctgtggtttcaagatcagagtccatggcggatagttatgtacacaagcgacaaacgtggttcttagcttaggttcatgaccagttccacgtagtacatatagcttatatgtatatatacaatctattttttactatgcataaggagttgtttcagcttacacggttgtatgttatagtcctttctaggtctactacatcctaatctagatctggttcctctggaatgttggcaccaccgctctgtattttgcggcgaaggtttgagtttggcctacctcggtttatttcattctcagaccttaatgtaaaagctttgacagttgacactgggtgtgtcctttgtagagaaagaaaaccttttcttttaaaaatcgtgttctatgtgttgtggaaccggtatgctgtttgaatatctgataagactgtccaacagtctacatatatgattatataaaacactattttcactatagactgcattgttcgtagaatagaatttaaatattagtataagaatagataaattgctgcagataacctaaagcacataaagcactagtttctctattttccactatcgtcacttttagaaaaaaaactttaatatttttttttctaatctaattgaaccgttacctcttagataggtcttgaaaaaaaatacccaaacctaagacgactcgaagctaaaagcagtgcaatgctctaggatagtatcatctcggtagatgagagaggatgggcgaccgagctagctataaaaaggggcatgctttatttttaactcatacctttctcggcattttaactatgtgtcacgaccaagtttcacacatgtaatgacccagtgtatagaaacaagtgtcacaaactctatcataaaaatataatgtctttacaaaaattaactaaacattaattcctccttcccaaaatatagttctttatagcccactttttacgttcatatttattcaaatgataataaatatagacatacatgtaaactacattcatatgttatttaatgaatatataattagcctaaaataaattatattttgggatgaagggagtataaactaaacaacgatcactatgatgatgacgacgacgatgatcacaagccacgagcagattgatcggagcgatgacagc

SEQ ID NO: 654 - protein, 1161 aa, Zea mays
MASGSRATPTRSPSSARPEAPRHAHHHHHSQSSGGSTSRAGGGAAATESVSKAVAQYTLDARLHAVFEQSGASGRSFDYSQSLRAPPTPSSEQQIAAYLSRIQRGGHIQPFGCTLAVADDSSFRLLAFSENSPDLLDLSPHHSVPSLDSSAPPHVSLGADARLLFSPSSAVLLERAFAAREISLLNPIWIHSRVSSKPFYAILHRIDVGVVIDLEPARTEDPALSIAGAVQSQKLAVRAISRLQALPGGDVKLLCDTVVEHVRELTGYDRVMVYRFHEDEHGEVVAESRRDNLEPYLGLHYPATDIPQASRFLFRQNRVRMIADCHATPVRVIQDPGLSQPLCLVGSTLRAPHGCHAQYMANMGSIASLVMAVIISSGGDDEQTGRGGISSAMKLWGLVVCHHTSPRCIPFPLRYACEFLMQAFGLQLNMELQLAHQLSEKHILRTQTLLCDMLLRDSPTGIVTQSPSIMDLVKCDGAALYYHGKYYPLGVTPTESQIKDIIEWLTVFHGDSTGLSTDSLADAGYLGAAALGEAVCGMAVAYITPSDYLFWFRSHTAKEIKWGGAKHHPEDKDDGQRMHPRSSFKAFLEVVKSRSLPWENAEMDAIHSLQLILRDSFRDAAEGTNNSKAIVNGQVQLRELELRGINELSSVAREMVRLIETATVPIFAVDTDGCINGWNAKIAELTGLSVEEAMGKSLVNDLIFKESEATVEKLLSRALRGEEDKNVEIKLKTFGSEQSKGPIFVVVNACSSRDYTQNIVGVCFVGQDVTGQKVVMDKFVNIQGDYKAIVHNPNPLIPPIFASDENTSCSEWNTAMEKLTGWSRGEVVGKFLIGEVFGNCCRLKGPDALTKFMVIIHNAIGGQDYEKFPFSFFDKNGKYVQALLTANTRSKMDGKSIGAFCFLQIASTEIQQAFEIQRQQEKKCYARMKELAYICQEIKNPLSGIRFTNSLLQMTDLNDDQRQFLETSSACEKQMSKIVKDASLQSIEDGSLVLEQSEFSLGDVMNAVVSQAMLLLRERDLQLIRDIPDEIKDASAYGDQCRIQQVLADFLLSMVRSAPSENGWVEIQVRPNVKQNSDGTNTELFIFRFACPGEGLPADVVQDMFSNSQWSTQEGVGLSTCRKILKLMGGEVQYIRESERSFFLIVLEQPQPRPAAGREIV

SEQ ID NO: 655 - DNA, 4445 bp, Zea mays
gctatctcttttacatgtttccataccggaaaaaaaagttaggaaaaagaacatgtttccataacggcaaaaaaataggtcccaccgggattcgaacccaggtcgccagattcaaagtctggagtgctaaccactacactatggaacccgtttatgtcataatgtggacaattaattattaaaccccagcatatggaaccaaatccatttcccactacctcgaaagtcgaaaccatttggtctagtcagaacaccgaagtatccaacgaatccattgtaattttgttgcacccgaaatggcgccgctacggaataagcggcctttatgcttggcgcgagagttcttccttcaaaatcgatcttcaacgttcaaattcaaaatgctacccccgtccattgtaaattgtatgtgttcagtattttatatataatgtttatgtttacagaaaaattaaaacgatatataatctggaatggagagagtagcaacatccaatccaatccatcgacccgaccgagagaaacgggagggcacgctgctatcagctacctgctccatagtgtcgcaaactcacagtcacagcagtcatcacatgcctcaaggctggaagggcagaacacttttttcttgacgcgtgtatctcagcgaccggcgccatcagtttgttttcgttccacgcccccacgcccaatgcgcccccaccgtccaggtccagccgtacacgtgcgtccggccggggatcgcagcagccgcacgcactggctgctgggctcggacggcgctgcccctgccgcagcgcagccatagattggaattgcggcgacgtggcctcctggcagcccaccctgaacaggcgcaccctatcctccgcctcgccgctcgccaatggacacctccactagtccacttggcgccactccagcttcacgctgcccgcgtctgtgattcccattcataagagctggccacgcagcctcggagcaacagacccccgcccacgaccacacgcagcaagcagcagccgcgcgctcgcctaggactaccgactacgagtagtgctcagctagcctccatcctcagcgcgcgagtggctgctgcgcattcctctctttatccgtctctgtgcttgtttaatttgtgttcgttcgtgagtaggcggccggcacatatggcagcgcagtccatgctcatgtcgaccagcgtcaacggcggccgcgcgctgccgtctcttcaggccgtccggccggctccatacccgcggctaccgctgccgtcgtcgtcgtcctcgtcagctggctacaggcactccaagtccgtctccgtgaagacgctcgccctgttcggcaaatccaaggtcaagaccgcgccggcgaagaaggtccgtgacccgtgcatggctagctagctagctagctgcacgtacactactgtactgctgctgtgccgtgtgttatgtgcacgcatgcatgctcctggctagttttattctattccctgtcatgtgttgctatgtgtgtgtatatatatgatggttttgctgtacaggctgctgcgcccaagcccaagccgaaggttgaggatggtatcttcggcacgtccggcgggatcggtttcaccaaggagaacgagctgttcgtcggccgcgttgccatgcttggctttgccgtgagtatagtcaaaagcactgcatctgcatatggagtgtgttcatgcacaccggaaggaattactccgtccctccgaaattataagtcgttgacgacacggccttcaaaatacaattttaaccatttaaaaattaaaataaactcttaatatttatgtttttttaaatactttcttaaataaattggtgtataacacgtgactattagtttttaaaactaaataataaaacggttatttatagtcaaagttttataagcttgatttaattcttatccaaaagatttataatttagacttggaggggtagaaggaagttgttcttatatatactctctgcgtttacatatatatgacgtttagaataagttagttagctttttatctaactagttttgttttaaacattatattacaaattaaaaatggagatagtgtaacagatgcaatatctttcgtattgaccaatataattagaggagtacacaccatcgatatctggtaatatattaggatatatatttatcttagcaaaaaaaaacatagccattcatttttgtgatagctgacgccgccgtagcatgatatggatatggacatacatatggtagtcgcagttacctgtgattttgtaaagttagcagcttcatgggttaaattcagcagggtaggaaaaaaagaggagtggtgggtggaagaaaattccaaacggtcaaaataattaacataaactactcacttaatttgaacctaaaataaattactcaattacacctctgctgctagcactctcccaaaataaataaattatagattgtctaatccacgcattattttgttatgcaaatctgctcgtgtatgtattattgtttcaaaccaaaaacggtagctagcattgccagttcaagctagcgaggatttattgacactgcttggcttcaggcatcgctacttggagaggccattaccgggaagggcatccttgcgcagctgaacctggagacgggcatccccatctacgaggcggagcccctcctcctgttcttcatcctcttcaccctccttggcgccatcggcgctctcggagaccgcggccgcttcgtcgacgaggaggtcaccggcctcgacaaggccgtcatccaacccggcaagggcttccgcggcgccctcggcctcagcgagggaggtaattaaaaaaagaaaaagaagctcacgacacctccgcatgcagctgatgagctgtggttgattgcttgatttgagtattttttatataataatgatggtgcctgcggtgcatgaacaatgcagggccgctgttcgggttcaccaagtcgaacgagctgttcgtggggcggatggcgcagctgggcgtggccttctccatcatcggcgagatcatcacggggaagggcgcgctggcgcagctcaacatcgagacgggggtgcccatcaacgagatagagccgctcgtcatcttcaacgtcctcttcttcttcatcgccgccatcaaccccggcaatggcaggttcatcatcggcgaggaagaggaataggctgctggctgctgctgctggcctcggacatgagtcgtgtgcgtttacttttacctgtgactgtgcgtctcggtgcgcgcgcgtaagtgctttgctgtgtatcaattactcgtgatgagacctcgaaggtagggtgtcgcgttgggttgtctgcttgtagaaacaagagcttatatataaattactactagctaatatgccatggttgcaacgagttctcctagactatataatcttgttgagttcgagagaccgtataaatcacactgattgaccttcggtactgagctgcatttctaagtggcgctctcttgtgtaactctactccgtttccgttctaacttttgcccccggcaaggtgattctgggagtaacgaccaagtttcagatatgatgaatgagcctatccgcttgtgtgtctatgggctggtaggccgagagtgtgatttgagcccaaatcaatggagtcacacagacgggccggccttgggcctgatgtctgatccttagccgcctaattagtaattcctgaagtacactccaactctcgaagtattacggctacacgtaaaccactgaaacggcggatttactgtgctgtgccagccatcgatcggcacgacacaggcacacagatcgttggttacctgcatggcacggcacatagctacgtaatagctggttcggtgactagggatttaaagatgatcaatggagaaggaaaccacatgctttcaagaaaggggtttcttccctgtggatttaaagactagggatttaaagatgatcaatggagaaggaaaccatttccttattggcaagacgacgccagtacgccacatctacgaaacggataataagcaccaaacggtctcatccactgtccccacgcgcagtagaaattgaagacaacctagacaagattatcaagggctaataactatagctattttatataaaaacatgtatatttaaacttaagatgcactttaaaacggacaaggcagcctggcctgcactgggtgctgagtccgcccctgcccacgcgtcagtgagctcttgcaaatcatggactcctatgagaaataactagccttccgaacccagctatagtacagctcagagtgggctctgtagagtctatactgttgggtgtgtcctctacagccggtcaatagagactggattgggcttaacccaactatcgttcctttaatcgggcc

SEQ ID NO: 656 - protein, 272 aa, Zea mays
MAAQSMLMSTSVNGGRALPSLQAVRPAPYPRLPLPSSSSSSAGYRHSKSVSVKTLALFGKSKVKTAPAKKAAAPKPKPKVEDGIFGTSGGIGFTKENELFVGRVAMLGFAASLLGEAITGKGILAQLNLETGIPIYEAEPLLLFFILFTLLGAIGALGDRGRFVDEEVTGLDKAVIQPGKGFRGALGLSEGGPLFGFTKSNELFVGRMAQLGVAFSIIGEIITGKGALAQLNIETGVPINEIEPLVIFNVLFFFIAAINPGNGRFIIGEEEE

SEQ ID NO: 657 - DNA, 2850 bp, Zea mays
gatacaaatacggatagctatgtgtcaaatacggaactagtcggacacggatattgtcggtaacgaattttttgtcggatatcatgtaagacatcattccacacgtatcatggttgtaatcatgtatccactcattgagtctaaacatttttgtattatatgtgttcatatgtcaccttttttttgtaaaattcatgaatttttagcctatgtgcgtgttattaatttattttgcataaaatcatcaaaatgcaaataagataccaaaactaataaacattctataagaatataacctgtctccacatgaaaatgataaaaaaaacttggatacttagagtgatttcacgtgtaattcacacaacaagtgaaagtgaaatgtaagaaacactatcatattttggattttatggtccaaatattttggaggattatatatgaacatatggtatgcctccataaattttcataattttctgaggctatttgtgtattattaatttttttctacaaaaaatcaacaaaatgcacacagctatccggataagatatccggatatccgagaagatttatccgagaaaatatccggatattcgatatccgacggatatcagacatattgtattcgaattcgatatccgaacaaaatatccgtattcgtatccgttatccgaaaaaatgtccggatatccgaaaattccatccgaaccagtgttcaccatcttcgaatccggatccggacggatattttccgaaccatattacatcccctatataagcttataagggaaaaaagactcagtcagcatttgttttgtcctgctcgatcgtcctagtcacctccaactccagaagcctcgcagtcacctggcatggaagctccatagtttaaagggctccactctgcacgtgtcaccttcccgccacacgtgtccatgctcggagcaagcctcgcgcgtatttagaacgcgtcttgcgacgatccggcttcccctgcctgagagaatcggctcggacagtcggactcgatcatcaattaagcgaacctcgccgcgatcgtatcagccatggcgaccgccgcgcacgagggcgtgacccagcgcgtcgctgccagtggcagcagggacgacggcgccagcggcggcatcgcggcggtctcgggtcccaacaagaagccgggcggcggcaggaggcggcgcggcctccgttcggtcgccgccgcggtgtccatccccgcggcgctcgtggctctgtccttcttcgccgcgggccactccacgccgccgccgagttccgccacggtggcggtggtgcgggccgggtcggtggcgtcggaggcggtgctggcgctggcggcgtggatggcgtgggcagagggcgggctgcacgcgcgtccggccgccacgctgctgccctacgccgcgcggctcggcgccgcgctcgcgtgggcgccgctcgtgctgggccgccacgccgcggcgcgcgcgggcctcgcctgctgcgccgccatggccgtgggcgccgtggcgtgcgcgcgcggcttcggcgccgtcaaccctgtggctggcgacctcgccaagcccgccgtcgcctgggccgtcatcctcgccgtcgtcaactacaagatgctctgagctcccgagaacacgcgcgcgctgttcgtgttcgatcctcggcagccaggcccctggttatttgttgtgaacatgtaataatgcgttggtttgtgtacagtatacgttctgagtatgttgttgtgtcctgcatattcatctgagaatgcagccaggcccctcgtcaactacaagatgttcttaaatttcgattgcgatgtaacaatgtatgtgtataccgtgtatgttctactactatgacgacgtatgggattggggagagatggatggtggctgtcatgtgctgtcatacgtcagctgccgaaaataatagtcagctgccgaagagatggatggtgtcatgtgctacgacctacgcgttgggcggcgtgaggtgaggacggacgtggctataggagaggaattgattacgcactatggagcctggaagggttgaagttttaagaaggaagataattggaagcctctctctacatgaaaattatcatactaatgaactcatttgggtcggtagaaatgatcacatctttgatgggattctgccgaccatacttaaattgctgggttttctttaaaaaaatatttgctttggttatccatagagcgaagaaacaacattttcctcttatagaggagtcgctagagcactaattgtgatctctttattatcttcttttttgcatcctaaattctgttaaatttacttggaacacaacagccgaaatgccaataggcacatacgcgttgggtactcaaaatgatgacaaagcacaagcatcaacattgctattccaatagataatgttatacatattatccataaaacaaagacgaacttgtgtaggctcactgcaacaaaaaggaatgaaacgatactgaaccacgcatgagttcaccataaggtacgcaaagacaaaacacagtaatacttcttgatattggtttatgcagttcacattccatttcatcttctactgggaaggaatgggctgcatctctggtgctgcagcaacgtcagccacggggtacctgaacacgcgggcgagccgctcagtgggcaccagcgggagataggtggccacggcgttcccgcgcttggcaccatcacgcaccgccgaattgtacctggcagagagctgtgcggcagtggggaggacggccctggtgaccgagggcaccagagggagacggttcagggccacccaggcctcggcg

SEQ ID NO: 658 - protein, 188 aa, Zea mays
MATAAHEGVTQRVAASGSRDDGASGGIAAVSGPNKKPGGGRRRRGLRSVAAAVSIPAALVALSFFAAGHSTPPPSSATVAVVRAGSVASEAVLALAAWMAWAEGGLHARPAATLLPYAARLGAALAWAPLVLGRHAAARAGLACCAAMAVGAVACARGFGAVNPVAGDLAKPAVAWAVILAVVNYKML

SEQ ID NO: 659 - DNA, 4787 bp, Zea mays
agaagcatcttcataattgcactgaacaaagagccactgcagtaacaagcaaatttcaaaagggatgaatgaatcattaatacataagaagaatctgtaaggaaaataaagaagacaccgcatttacaagctacaatctcggagcttatatttgatgattcctctccctcgttgtgttcaattgagtccactaagcaaatctgcatcatgatgcttatcgctgtgacagtgtactttgcatcgcatggaacaagcaagtgttgaaaacaaatcacacagccaagcttacccaaatcatcaattgaaaccgcagcagtggccgagtcccactcatccatcgcatcctgagccgcctaaaacaggtatcccagaagaagggaaacgtaataatagaaaacaaatccaacaattaggccacaattccggcaaaccaaagtgaatcctcgccctcgcatgtgtcacagaatcgaccctgagtagcgacgaccttaccttgtgcgtggagtccaaacctagtgccacctcatcctccgccacctccgcctccggctccacctccagccttttcaatgagagctgctccacccggctgaaacgaacacgcaaacaaaacaaaaggggaacaatgcagattgaagaaccagatccacgggaaggaggaacccaccaagcagagacggaaaaggaggatcgctggctaacctatgaatggcggacgcatcgaggggcgcctcgtcgggaccttgcgccggtactagggcttgcgcctccgccatggccgtctcactctcccgcctagtagacagagagatttggttttcgaaacggaggggagaaggaaagcgagcacgtgactaacgtgagacagatgaacgactgcgattcgtccgggcatgcccgactcccttcagccggatgcctggactggatccgtttgcgcttaacggggccccgtttggtcggcccgtgataagcaggaggccaggagcagccgccagccagctagcagcgtccctgctgctccgcgccacacctctccgcttcattcctatccgtctcccctgctctatcgtcgtcctcctccgtcgggccggaggagcgtctctttgtcggcgcagcgtgcagagcaccgcaggttcggctctttggcttgctcatcccttcccctcctctcctaggttctccatcccgcgccaccttcttgttccagttgcgtctgcattcagggctacgtagcatcattagacgaaggtttcgtgcgcggttaatcatgcttggaagtgagaattttgtgacccggatcgatcttggcgcatattttggacctagtgattgcgaggatataaacgcgctagaattcagctgcggacacttcttgtcagatgtctggcggcagattggtagttcagtcttattaataaaataaaacaaaaaagagatgagtcatggctgcaatccataaacacaaactgagaatgtactctaatgtttatctagagaaagcctgaaactttttctgcgaacatttctgcttgaattggtttgagttctatactgaactttcctcatgagctgcagattcagagacacgatgatgtcgcgacagtgtgcaaaccgcatctttcttaccggaggttccagcttcctccatggcctcaaatctagagttgcatccagtaggagtcacggcaccgtcagactcaactggcgctgcgtgagaactaatctctggagggccgagcgccttggtgtcaaggctactccgtctgaggtaatacgattgcttattcgttgctactgaccaattcacctcttgttataccactaagaagtaagaacagcaagtttttgtctcctccagcatatcattgcagtactgcaagcgtcagatattttcagtggcatcaggaaatggagcaagttgcaattggtcgccatgacaggggtgatggcatgtgtagttctggtagtcccttcttctgatgcagtcgatgctctcaagacatgcacttgcctgctaaaggaatgcaggtgactcttcatcatactgtcaacatagttttgacaccatataggggctgcttggttcggaaatagtctcgcctggccaagcaagccttgccttgccaccgtagccgagtgtaattctctcgtagaaactagccaaaatcatgcctacagaccacaaaggtttgtgtgaatttatattcagtatgtagccaatataggtcaagaagaagttagttactacttgaaactaagagctccccgatgacaagtttgtcatcttttggatgagagtaaccttagatcattttatacatttcttactcaattagtttctctctctctctttcagaatagagctggctaaatgcatagcgaacccatcctgtgcagcaaacgtagcatgcttgaacacgtgcaacaatcgacctgatgaaactgaatgtcaggttattcccataaaccttgagctcactgaaatctgccagaaaaaataagttttttatgccctgcttttgtcatccatcagataaaatgcggagacctgtttgagaacagtgtagtcgatgaattcaatgattgtgctgtttcacgcaagaaatgtgttccaaaaaaatccgacgtcggcgagttccccgtccccgatccatcttcgctggttaagagcttcaacatggcagattttaatggcaaatggtacatttcaagtggcttaaacccgacgtttgacacattcgattgtcagcttcacgagtttcatgtcgagggagacaaattgatcgcgaacatcacatggagagtccgcaccccagactctggcttctttaccaggtcaaccgtgcagcgttttgtgcaggacccatcgcagcccggcatactctacaaccatgacaatgagttcctgcactatcaagatgactggtaaaccctcttagaaattctttctcactactgccaatgtgcccattcctcaaggtttatcgacttggtatttgctgacctgtaggtacattatctcatccaaggttgagaacaaggatgacgactacatatttgtgtactatcgtgggcgaaatgacgcatgggatggttatggtggttctgtattgtacacaagaagtaaaactgtacctgaaacaataataccggagctggaaagagctgcaaagagcgtaggtcgggacttctcgacgttcatcatgaccgacaacacctgtggtcctgagcctcctcttgtggagagaatcgagaaaactgtggtggaaggagagaagaccatcgtcagggaggtgaaggagatcgaggaggaggttgaggagctggagaaggaggaggcgtcactgtttcagaagctggcagaaggtctcatggaggtgaaacaggatttcatgaacttcttgcaggggctgagcaaggaggagatggagctgttggatcagctcaacatggaagcgactgaagttgagcaagtcttcagccgtgcactaccgttgaggaagctaaggtagctgcagagcaaaggacttggagaaaacaagccatcaagtactggccgaaacggattctatttgccacagcagtacccacagtagagattgttgaacagatacaacaaacatttttaattttcttttctttttcttttcttttcttttcttttctttgtttacccttttctgtggtcaaaacacatgcctacgttagccctatttgtaaagcatcaagagacaacgtaactttttcttgccaaacagagaaaaaaaacaagtgtacttaagactacgctgaccatctcttgcatgacaattgtttgttgttatagtttcctttgccattccatctaaatttaagtcatttccctatgtaaaatgcaaaatcaaaaggaactcttatatttgtacgccgtagtgcagtaggggacctctaccccagttttaaagtagaagtaaaaaacggtatagttacatatcaccgaatttcatggggttttttaaggagactatggaaaagttgattatactaaaaatcttcttcaggaagacaccaactagaaaaatgctagtaaaaggataactggttaacttgtatggattttactagctgtggtatgcagtattttttgtgtttataatcttatcatagcaattaaaaataacaaggaagcacactgtagcttatttctaaatactccttttgtcccaaactaaaatttattttagataattaatagtacatttatacaatattggatttatgtattttatatatgtgtctaaattccatttgaatatagataaaaaaacgagctaaaacgaatgctattttgggatggagggagtatattttattttcgaacgccccagttggtatgcatgtcatttcattaaaaagaaaaaaagaaacagggttgtccagctacggacggacaggatacactagacccacatgtgacctgaaaactagaaaaaaacagatttgatacaaagctctagacatgaccaacagaaatgctctaaaaacagtggaggaccatccagtcctggacagcgaccagacaacaaattattgcagttttgaagcccaaggccccaagcccaccaccacatcctgccccccacccctatctgtggaaaggagatcgggtatgcatggccttgctttttcaagaactgaaagcacattgttggtgtcttgctgatatccacattaactaactatggaattccagagcccattcgataaaccttttattgttgcaaagaaattgctcactccatact

SEQ ID NO: 660 - protein, 446 aa, Zea mays
MMSRQCANRIFLTGGSSFLHGLKSRVASSRSHGTVRLNWRCVRTNLWRAERLGVKATPSEHIIAVLQASDIFSGIRKWSKLQLVAMTGVMACVVLVVPSSDAVDALKTCTCLLKECRIELAKCIANPSCAANVACLNTCNNRPDETECQIKCGDLFENSVVDEFNDCAVSRKKCVPKKSDVGEFPVPDPSSLVKSFNMADFNGKWYISSGLNPTFDTFDCQLHEFHVEGDKLIANITWRVRTPDSGFFTRSTVQRFVQDPSQPGILYNHDNEFLHYQDDWYIISSKVENKDDDYIFVYYRGRNDAWDGYGGSVLYTRSKTVPETIIPELERAAKSVGRDFSTFIMTDNTCGPEPPLVERIEKTVVEGEKTIVREVKEIEEEVEELEKEEASLFQKLAEGLMEVKQDFMNFLQGLSKEEMELLDQLNMEATEVEQVFSRALPLRKLR

SEQ ID NO: 661 - DNA, 6547 bp, Zea mays
ctagagtgatgaagaatcaacatgcagggagtgcttgatccttgcgctgatcaagaggagccacacccttgcgcggttgctccaaaaaagactagtggaaagcgtcgactttctgatacctcagaaaaacatcgtcgtgttcctaacacttcatttactttgaatatttactattgtataattaacttcttatatttagattactagaattgtcaagttagaataaggttagaacttaaggtgctaagcttatatgtgaatggtagaaaatattattgggcacaatgtggcaagtgagctatttgatagaatttaattattgcgaaaaagtttatcgtttaatttatatttttctcttgagtatcttgatcggccagaaacatagcattgtaaagtatatttgaagctctccaatatggttaaaattgaaaaaaaaaattgcacaactaggcgtatccagtgagaaaaggccttgccactctacgtatctgatgttgttaataatttcagaagtcgtcgtatataccatggggtgtttaattgtcgtatatacgatgggatgcttaattgtcgtatatacgatggtatgatgaaacaactgacttaaacatcacactgaacaatttcagaaaacgatccatgccgtcgtatatatacgacaacaaaataccagaagcaaacctcccagacccaaggggaaataaacgggcctgcttctggtcgctagcttgggggcgctggagctgcagtgcgtaggcccgtccgatccgtggctcgtctcggcatggccacacaaaccacgaacggtcgtcgtgcaccgcagcgcggcccccccgttctatcttctccagctccaaatggcgccatcgcggcggccgggttatcttgtccagacgtgcatcatatcctccgtgtgatccattcatccccgcgccgtgctagcttgctagttgcaagcaccagccgaccaccaaacggtagcgcacgcggacaatttaacagcatcaggtttaggccctgctgccgtcgtcgagcgcccgggccaccgcacacctgaaagcaatggagatcgtcgccacgcgctccccggcttgctgcgccgccgtgtccttctcccagtcgtacaggcccaaggtacgtacggcaccttcatatctcgtgactactgtacgtaagcggaaagtagcagcagctcgtcgcgcacacgtgcagaagccttaagtttgctgatgatgttgatgactggcgccacacgtgcggcaggcgtccaggccgccgaccacgttctacggcgagtcggtgcgggtgaacacagcgcggccgctctcggcgaggaggcagtccaaggcggccagccgcgcggccctcagtgcccggtgcgagatcggagacagcctggtgcgtacgcgtacataacatcggccgtcgtcgaagaacgaagctgacgccgctgccgcgtgccggctccgggttgtggtgtggtgtggcaggaggagttcctgaccaaggcgacgccggacaagaacctcatcaggctgctcatctgcatgggggaggccatgaggacgatcgcgttcaaggtccggacggcgtcctgcggcggcacggcctgtgtcaattccttcggcgacgagcagctggccgtcgacatgctcgctaacaagctcctctttgaggtgtggtctcgcaccgtaccgtacgtctctctctcacacacacacaacacaacggtccttttcaattggctcgtgcctgctctgtgcctgcaggctttggagtactcacatgtgtgtaagtatgcgtgctccgaggaagtccccgagctccaggacatgggtggcccagtcgaaggtactgccatttcttctctaatctctaaagtaacaaagaaaagagaaaaatcccattcaacccctagatattaggtacatgtcatgcacccaataacaatgaatcatttccatttatctgcaatacactaggatagggagtaagggcatgtttcgaagtacccagtttttcataaactagtttatgaaaactaaagtggttccaaatataatagttcatgccctagtttataggaactggatttccagtttttgagatggttctaaacaccatcaaccaattttttagaaattaatttgtagaaattgtagatagaaactaaattcttaaaaactaggttgcttccaaacaaaacctaattcaattattgtacaaatactcaagttttactatgtcacattactactactttgaaacgacatgtaatgtaacacgtcacatttttttcagctcgcattacttttatgtcaggcattactgtaaaaacatattgtatgtgtatgtttcttttttctaatatatgttgccacgttacaataataacacatatcatgtcgagtttattgtatttgcattcaaagtgtaatgtgcatatgtctcgtttgcttttatttacgttgcatttgaaaaaaaaaacatacaagctatttttgtcgatattttattcaggtagctaatacgtccacgtacattgtttgaacaaattagtaggttacatcatattatcttttaaagcgtcacgcacacgtacactagagtatggctatgtttagaaccatagagctaatagttagctagataataaattattagtcacgttgagtaagctaattaattaattaattattagttgtgagttaactaacaattagttagggttttagtgaggatgtttaaaacctgtataactaattttatcagctaactaatagctctagaggttttaaacatggcctactctacactatattaattgtcaatttgtcatgttatatttatgctcacaaattatgtcaatgtccaaagttgcaaaataaaatgattgattcatcaaatctaatactctctctgtttcaaatatttcaaattataattcgtttgactttttattgcgtgtcttattaaaaaatcatagttattattattatttattgtgatatttttatcatatgatatactttaagtatgactttgaaattttaattattttgtaaaaaatcaaataagacgagccagtcaaatttggttaaaaaagtcaaacggattataaattaggatggaaaaagacacgcatgcattaagtagatctggaaaaagattttgatatataatactttacaattttgcaaaatagaaaatcaaatattatatattcggcctgttacctcaagtaatagatgatataaccatctgattataattaaataaacgatttagtgctttcagagtactgtaggtcctgtttgacactttttatttcacagcttgttcacatacttaaatagaagctatactaaacaggactttcctgtagtagtttatcagtttacttacttgttagaaggaattaaaagtagacaataaatagaagctgttttccaaccgcttcttagataagttgtttttcgataaacagcacctgcgccaaacaggacagcaaaaccttcctgtgcaggagtacaacgccaccccccccccccccccccccaccaaaaaaaaataaacaggaaaacggacattgtaattagagagttgcagggcttcagtgcagcgctactagtcggcagtatgccaacatatactccattgtgcatcttcagagcactgtagaaatgtaactgctaattaacagcagtatgcctgaccaaattagcatgctgccttcctgtagtctagttttagatgatttctgatcaccaaactgcaacacgtcaaatgtgccgatggctttccaagccttccaccttgccgaaacaggcacacgttcttttggaccgcggctctggatatgcagaaaaccaacacaacctatatacgaatgaaagcctccgcgatcgattccgatcggcctgatttccgtcacatctcgcaggtggtttcagcgttgcgttcgaccccctcgacggctccagcattgtcgacaccaacttcaccgtcggaaccatcttcggagtctggcccggcgacaagctgaccggagtgaccggcggcgaccaggtcgctgccgcgatgggcatctacggccctcgcacgacctacattgtcgccctcaaggactgccctgggacgcacgagttcctcctcctcgacgaaggtaaatggcagcatgtgaaggacaccacgaccattggggaagggaagatgttctctcctggtaatctgagggcgacattcgataaccctgagtacgacaaggtactccgttactggctcctgttactgtcagtatttttttttcttcttcttaatatctgctacggctttctgtgcgcgcctaatcggtgctacaaatatatgtatcttcagctcatcaactactacgtcaaggagaagtacacattgcgctacactggaggaatggttcccgatgtcaaccaggtacatacgtatatatcacaaaaactttaaataattcacacccttagggcttgttcggttagctctcaatccatatggattgagtgggattgggtgggattaaatcccaagcaagtcaaagttcttctaaattttttccaatcccattcaatccatgtataataggaataaccgaacaaacccttagtaaaccacacagaaaaatcccgacacctcacaacccgtacgttcactcgatcggatcactagcttaattagtaatcaggagtagtacatgttccaaaaccaaacagatccatatatgattaacctgtcatgtcaactctctacacaccttgcacaccaaaacagccaaattttcagagaggacgacggcgcaaacttttgagaagaaagaatttggtttgacgttgccagtaaaatgtctcgggctgtagagtcactgcaagcccatgctagtgaacattgagctctgtgtaccagcgtctgctttaaagcaaggccacgccaagcaacacagcaattccctacagtgaccccccaacctcgctttcgctttaggtcttttcctatgccgctttcagtacacagaacctgcgtgagcaccagcatatatgcatgcatatgatgcctgtgagtatggtcgatgatgacgcagatcatagtgaaggagaagggcatcttcaccaacgtgacgtccccgacggccaaggccaagctgcggctcctcttcgaggtggcgcccctgggcttcttgatggagaaggccggcgggtacagcagcgacggcaagcagtcggtgctggacagggtgatcaacgagctcgacgagcggacccaggtggcctatgggtccaagaacgagatcatccggttcgaggagaccctctacggctcgtccaggctcgccgccagcgccaccgccaccgcccgcgcccttatctgaattactagaatccgggctcgtagatgctggagtacacagtacagggaaattgcccacttttttcatcaacttaagtttttagattaaacttttttgaaacaatcagacaggagatctgtcttatatattgatgaggagaaagatgcccaaaggcaaaaaaaaaaaagtcgatacaataacaagtccatcagctgctagaacagcctcccaaccgcaaaccaaaaaacaacccacgactagcatcctatctaagttgaagccaaaaagtagtcaagtgcctcgcctggaccgccatccagactgtcgcctcacatttaatgaggttacaatctactggctactagaaaacatgcaatcaaaagtactcgtatttctttcctaatatattgtcccgttgacaaggatcagcaacattctaaagcctttttctattacagcccaacaacatagccaattctcccaccaatgcatcaacgtgggagataactcctagctggatggcttcataactccagggtacctacacatagagcacaagttagggtatggggccaatttctagaagctaaacggcccagtctaaatacaattttgaattgcttagctgaaaaacttgctctttggaacgcccaggtatgagtctgtgcaaatcgaggcgaaaaattacgccttatatgccgatttcactgtgtatcggtggtctgcaatgaatttctagctgaagatatctttggcctctggatctaaatggatcttttgaacttcgaaccaaaaaaattgaagaactcatgaaaacggtgagggtgtaattactttgaccaagcagagcgagatccacgatctagacattgtcttttaccgcctctaccaatgatttgctcttgtttcttgatatagtaaagagcctaagtgccacgtccttcagtctcagcccttctgccgaaactctgttccagaagagtactttagaaccatcagtacatcaccaatcctaatatccgtcgaaaccataaagagcagtctatcaataatagagcaaggtgtttccaaattgccccggacttttacatggcgaggtgcaataattctgccggttttagattaaacttgtggatacatgcaactcgaattatcgttatctatttttatttt

SEQ ID NO: 662 - protein, 385 aa, Zea mays
MEIVATRSPACCAAVSFSQSYRPKASRPPTTFYGESVRVNTARPLSARRQSKAASRAALSARCEIGDSLEEFLTKATPDKNLIRLLICMGEAMRTIAFKVRTASCGGTACVNSFGDEQLAVDMLANKLLFEALEYSHVCKYACSEEVPELQDMGGPVEGGFSVAFDPLDGSSIVDTNFTVGTIFGVWPGDKLTGVTGGDQVAAAMGIYGPRTTYIVALKDCPGTHEFLLLDEGKWQHVKDTTTIGEGKMFSPGNLRATFDNPEYDKLINYYVKEKYTLRYTGGMVPDVNQIIVKEKGIFTNVTSPTAKAKLRLLFEVAPLGFLMEKAGGYSSDGKQSVLDRVINELDERTQVAYGSKNEIIRFEETLYGSSRLAASATATARALI

SEQ ID NO: 663 - DNA, 5087 bp, Zea mays
ggtgcagagggaggcgaacggacagtaacagtcgccatcagagctaccgttacagtcaatcagaaactaacgccattatagacgtccgttactagacgacaaccagtcattacagcccatccgttactggccataacacaggaaacaaccagtaacgtacttcgaaccaaggtccaatctaccacgaccacgtcccggctggtgtcgcgcgcgcgcgcgcatgtggcaggctttcatcatttttctcaacttctcaatagatgtgtcaatgatccacctatttaagttgatttgattgatttgttcctcgaacttatgatactaaagtattagtataccgtatatttaacgtgggccttagcattgaatattaatttgggcagacccacgttaatccaacagtaaatagactggaatctaatataaaaataaatttgaatttagattctattcccataaataaaaatggacccgaaagagacgcagaatctagagccatatagatgcaaagaagccaactcttttgcccccacggcatcggattcgcatcgtctcctttcctttccccgtcgctgccgagcgcccaaagcgcgaggtggcgtgtcccgtgcgccaattgccagctgaatcaggctcgcatctgcgttccaacgcagatggctgtgcagcgcagttgcaaatgggcctcgtcaacacaagtgcactccggcatcacagttcacaggctaacagcagcgaatgatccaaccgtgaatcctgttatttgcagccaggccaatgggcatttgccctgttttctcggacacgcacgcttactctcttgacccggcggcgtgccgtgccgtgccgacgcaccaagtcaggctcagcttcctgagcatttatcgccgtagatatccgcacccatgcggcacatacgtggaacccacaccccatcgcattccccatccaccgtcctccgcccagcaccaccaacgcgcgccccggcgcctatttcaagccacgtcccaacaacttgccaattcgcaccgcgggaccggcgccgtcttgttgctccgctccggccgtgacacgagcgcaccagccaccgccagcccctcccccgtcgactcgagccacaggacaaggcatcccaaccgccgcccatctcctatcgtcatctgccgatccctcctcggttcctcacagtcacagagcctcacgtcacgtgtacctcccccaacccaacccagcccaacccagcccaaaacctagcgggcgaggggccggggaaccgaccgccggacgcggagatggaccacgcggcggaggcgcagcggacggacctgatgacgatcacgcggcacgtgctcaacgagcagagccgccacccggagtcccgcggcgacttcaccatcctcctctcccacatcgtcctcggctgcaagttcgtcgccgccgcggtcaacaaggccggcctcgccaagctcatcggcctcgccggagagaccaacgtccaggcaagcacggcaccaccacacacacactgactcgcccgccccgacgatcaccatccactccgcgcctttcgtgcgtactctgctgaattactgagcccccccctgacggtgggcccggggcttatcacagatggacctcttcctagctgcatgctgcatctttttagctgaacggaacctactaccatgcatcgaatccatcgatcactatgctctctaacgcaagaatagactgctcttgctcttcaatcaacagttcaacacacgcacgcacgatccaaacgatattcgtctatctggcacagtttttttctctcttcagtttacctgctctagctgctcgtcgttgacattcaggagccaccccaaaaaaaaaatacagggcgaggagcaaaagaagctggatgtactgtccaacgaggtcttcgtgaaggcgctcgtcagcagcggccgcaccgtaacgcgctctcctacactacatacacatacacccgtacacgtcccaggttctcggcttaggcattgactttggcactctgcgctttcttgcgtgcagtgtgtcctcgtgtctgaagagaacgaggaggccatcttcgtcgacccggccctccgcgggaagttcgtcaatcctttgctcctccatcccgacctcgtaaaagttccgcaacgccgtactgtcgctttccctgatcgcgtgttagttctctctctctctctgttcaggtactgcgtctgtttcgacccgctggatggctcctccaacatcgactgtggtgtctcaatcggaacggtgtgtcactgtcactcccggtggtgtttcaaaccttcttaccatcgatatatcatatatatatatatatatatatatatatatatatatatatatatatatatatatatatatatatatatatgctgctatattcggttctgctctctgcagatctttgggatttacatggtcaaagacaaggacaacgtgaccttggaggatgtgctgcagcctggaacaaacatgcttgctgctggctactgcatgtacgggagttcatgcacggtaactatctattgctagatccactttagtttttacgccccggccggccaattcacttcgactcgtcttataactgtatcgactgccgttaccaactatggcagcttgtgctgagcactgggaacggagtcaatggcttcactctcgatccttcccttggagagttcattttgactcatccaaatatcaaggttaatgataaaaaaaactccacacttcttttctttcctggctgatcgatacccctggttagcactataaaacaaaatggtactacttgagtttgggtatcacgttttgtgcgtgcttcgttcttttcttgtgcagataccaaggaaagggaagatctattcagtcaacgaagggaacgccaaaaactgggatgggcctacagccaagtacgacgagctagggggctcgtttctgtccaaaaactactactgtgatttcgtaacaagccaggctgaattttatgccgtttcagattcgtggagaaatgcaagtatcctgaggatggttcaccgcctagatccttgagatatatcggaaggtgatccattgctcgttctcgactgtgtataccggtgtctcacagtttgctttcttctgcggtcatgaattgaatgtgtctgaagttttattaagaataatagtgcttgctcaagctattggtatctactcgtttttttcttctttttttttgtttaactaaaacggttgaatctatgttgttgtggacttgtggtccttgtgaatggtttgcagtatggttgctgatgtccatcgcaccttactatacgggggcatatttttgtacccagcagaccagaagagtccaaacgggaaactacggtataacaaagacaacaatcttttttttacttactattactactcccgggactgtagtttagcttcctgtcctcacactggttggttctatgtggaattgcagcgttctgtatgaagtcttcccgatgtcattcctgatggaacaagctggaggccaggctttcacaggcaaacaacgggtgtgtttcagtttccctttctcagaccccaatccccaactgaaaaatcttgatgctagagctatcacatttgcctgagatatcagggggaatttcaacacttttacaggttgaaattattaagaaaagagcactattttaacatgccatgtttttttttaccagtggttggcattgcatataactgaaaatgctcctgctaaatttataatgcaggcgcttgaacttgctcccgctaaacttcacgacagatccccagtgttcctcgggagctacgatgacgttgaggagatcaaagcactgtacgcttcaatgtcaaacagcggttgacctttctgcctgaggaaacgagcgagatcaaaagcaccgtacgcttcagagtcaactgcttgatctttatagattgtaataaaataataaaagagtttgtaaaaaaaaacaacaacactgcttgatctttctgcatgaggataaaaagcgcatagtttccccggttggatatatccatcagatatttattatgttgttgccttctacacaaatttaacgtgctttcgtgattccttaatgcaactttggattcatgtacggagggagtttatgtgaagacatattacttggtgcagtttatctccaacaaaatacaaaaaaaagaaccttgtgcagttatacttcagtcttaatgtcgtgttcatcggatttgtgacgctccaaagcatagtcgttgcagatccttgattcgaactcagccctctcgaaagcagtagagatgcgagatgtacaagccagaggaacactctcgacagcagtagagatgcgagatgtacaagccagaggaacacacgacagatataggagaattctctatatttattattagggtgtattagtgtataattgctttcatacaaactataaacccctcaggcttagtttgggtactctagtattgaagtggtttggagggattagagagtgtataaatccccaataagttaaaaactcccataatacatctcaatccacttgaacccctctcattactagagtatccaaactagccctcaagtgtagtttcggtattaaactataagatctcctttaggatttttcaacatccccccttagacgagtgcggtgattacttatgtctcatcaaaactccgaaaatctagtggtaaaaaatagagaaaaaagagcataatatcactcgatgaatctagtagtaaaaatggagaaaagagagcataattgtcactcgatgatttgtacttgttgcctcgttaaaaatcatatatgagaaactttagaaaaaaaactcataatgggaaaaataatacaacatgtgtcttcaacctttaggatgtatagtatataatcttcagggtcgaatagcaaggactaaaattcagaggtgatctccctctgaatgtggcatgtctctcaagtgtttcatctctatacatcgtacaatttttttgaatgcaactgtaagggttt

SEQ ID NO: 664 - protein, 342 aa, Zea mays
MDHAAEAQRTDLMTITRHVLNEQSRHPESRGDFTILLSHIVLGCKFVAAAVNKAGLAKLIGLAGETNVQGEEQKKLDVLSNEVFVKALVSSGRTCVLVSEENEEAIFVDPALRGKYCVCFDPLDGSSNIDCGVSIGTIFGIFTWSKDKDNVTLEDVLQPGTNMLAAGYCMYGSSCTLVLSTGNGVNGFTLDPSLGEFILTHPNIKIPKKGKIYSVNEGNAKNWDGPTAKFVEKCKYPEDGSPPRSLRYIGSMVADVHRTLLYGGIFLYPADQKSPNGKLRVLYEVFPMSFLMEQAGGQAFTGKQRALELAPAKLHDRSPVFLGSYDDVEEIKALYASMSNSG

SEQ ID NO: 665 - DNA, 4673 bp, Zea mays
caccctcacggccaccactgatttaagtgtaaaaaatacactctattgcttagataggtgttaactcgcctaacgaaaaaaaagaaagcatctaaataggactatgagtatagagagtagttgcctcgtttgactgacagcctggtcttggactcttggtggaagctggatcgctagtctttcttggtctacaagacaaacaacaaatgaggcaaatggatatgaaggatccttttgctttgatttctttgtagtccgcgtagagtagtacgtatactcgtactaccatgcatgtgtgtttgtactcccgcatagagtagcagtctagcacggctatttcgtactaccatggatatgatccacgtgggggtgtgaacggaatatttcaactcaaacgttacaagtattctaatcaggtgcttgtacgtgtcatttttatttatgtttgagcagtataaaacataaagattggtgtgttttgttggctaagtaggtgtaattaaagtcaacaactatggttcaaatcttatttatgtgtaattttaggttttttataatatgaatggaagagaacaggtgacacacaataatagtgaaaattgattcttttttatagtagagtataatttaattaaacatattagtcagttttattcatgcatgtatctagtgggaaagtgaaaatagaaaaacaaaattgcaagatttccatgtctcagtgagacatctgatgcgtgtaccaatttcgcatcacaagtagatacagattttagcgtgcaaaacgttacacgtgagaaccctaatgacacaggctgcttccaaccataagaaaaaaatcacggggtaattaaaaccattcgacttggagaagaagaaaggacctcctgggtttctggaagcccggggaagcaaggctccttccccgtcactgacggggcggatccaccagtcctgtataaaagtccttccccaaaacatccgcctcacttccaaactgcaacgaaaacccacgtctaaaacaggtggcccaccaacgattcacttccccgatcccagggggcggcgatcggaattcgcaacttctcccacgcggcgaacacggcagagatgatgagctcccgggccggatccatcctcctccgccacgccggctcccgtctcttcaccgcagcggcgatctctccggcggcggcctcgaggccactgctcgccggcggcaatggtgttccggcagtcatgctacggcttatgtccacgtcctcccccgccgctcccacggaggcgaaggacgaggcagccaaggcctccaaggtgggaggagacaagaaggcggtggtgatcaacagctactgggggatcgagcaaaacaacaagctagcgcgggacgacggcaccgagtggaagtggacttgctttagggtacgcgccctgccttctcgggctcgctttgatcattgtgcagtttatctgccctaatttgcggttcgtctcggcggtggatcgattcgcgctagttgtgagtgattaatctgttgtttttgttgaagccatgggagacgtacacggcggacacgtccattgacctcaccagacaccatgagcccaagacgctgatggataaggtcgcatactggaccgtcaagtcgctgcgcttccccacggacatcttcttccaggttcgtgcccacgcgcgcacgctctctgttcaatagcgcggatgatcagttcggcttgcgtttctaattagtaggatcactaaaaactgattatactagtacatgcgccatgagaggttaagcataatggctcctggctgtgctcctgctttgtgggaagtcgcagcttgtatttgcaatttgcaacgtggatgaaatcgagtagtttacctcgaccacttcggggacccgattttattctatcgacgaaggtgggcactgccgcactgagcagtgacgactgacgcggacatcagcaaatggatctataatggtatggcaaatggatctatgatggtatggcagcctagagctgaaagttggatgttggtcccggtcatatcttaatttgagctaacttttttcaggtcgacacgatatgaaataattttgagctagactatattgtaactagatactaagaaaatagatctagctcggtccgaaacaaggcggaccgatgatcatgcagtgctggctcatacggaacacgtaaaaaacttatatatatttgtgactttgctatagacaaaattatataagaaagagaaaccaatgttttctataacttttgtaaatagataaaagtattggagcataaaataattatttaaacattagttttctaattcgtatctcacttcgtactatatcgcctttagcatggtccatttaatcatatcgtgtcgtgccagtgatcttgactaagtttgaggcatgacatggtgacctattttttcgtgctgtattgtactttagactcttattatttttcttcgtgttgtattgtactttagactcttattttcgtgccgtgacgtattagccccggtccaaactgcagcccaataaaataaaggcttgctgatatttgtttgtatcagcaattcatctttttaatctggcttttagaacttggttcgtagatgcatgtcgaaatgatctgcatattttgaaggaaggttgaaaggtcgatcattcatgtgctgttgtaagctgaccctgtgaattgggcgaattgtctgcagaggcggtatggctgccgggcgatgatgctggaaaccgtggctgcggtgcctgggatggtgggcggcatgctgctccacctgcgctcactccgccgcttcgagcagagcggcggctggatccgcgctttgctggaggaggccgagaacgagcgcatgcacctcatgaccttcatggaggtggcgaagccgaggtggtacgagcgcgcgctcgttatcaccgtccagggcgtcttcttcaacgcatacttcctcggctacctcttgtccccgaagttcgcgcaccgcgtcgtcggctacctggaggaggaggccatccactcgtacaccgagtacctcaaggatctggaggccggcaagatcgagaacgtccccgccccggccatcgccatcgactactggcgcctccccgctaacgccacgctcaaggacgtagtcaccgtcgtccgcgccgacgaggctcaccaccgcgacgtcaaccactttgcatcggtacggatacttccgaattccaataccagcaactctgcttgatctcatctcgttatgggattggttctgaaatctgaattggtatgagcttgtgccgtgcaggacatccattgccagggaatgcagctgaagcagtcccctgcgccgatcggataccactgaggatgtttgtgctcttcttaattttgcatcgctaataagcaattgtctttaagggaaggaaaggatgcttattgagttacgagtactgctacggcgattaggatattttccaaccagttgtttgagagtgaaacctattatatgtacgcatgttacatgtacatatctctaagtgcgagaggtgcttttctggcgtttatcacttcttcctggagttcctttgttcttcatgtcagctgaattgggctcgctaatatcgaatgtacaatttttgcataatccctatcttgtttgtagataatcagttgtgcttaatttcattgtcgttgtttgtgattggatagggatgacaacaagccctaaattttatactataaaatttaagtatcaattaggatcgagcgtatgttcaaatcagattatgatcgagctctatttttattaaatatttgaattagaaataatttaggattctaactaaggccctgtttgtttcaacttatagattatataatctggattatttgctctggattaaataagctaggtgctgctgtttgttagctcggattatttggacttgacttattattcatatgcatgcaaatacaataatacccttggctgttttacttgtctggtttcatcagttggcactacgcagtttatacacaacaatttatacacgtttatagatgcttttttccaaatagctcatacacgttttgtccaacaattgtttaatgcgtaattttaaaaagacaaataattcatacatgttttgtccaaaccaaagtactcaatataaaattacattctcatatcaaatagtgcattggcaatttgatctcgaaagttattcatgtctccctcttcttctcccaattggccttcagcattgtgatgacttggaggaatcggcatatagttctcgtcttgatcacaacgatcaaactcatcatcggccattttactatctcaaatgaaattatgtagagccatgcatgcatgtattatttttgattgcttcaatatcggataacttggcaagtccaacaaaattctccacttcatcttcaatacaccgaaagaacactcaatgtgattacaaagagaagagtgcaattggttgaatacctcctctatgcttctctcgctcactctgaagctctcgctgatagaggcagcaagtaccaacggaacgtacctgtaggtgcgccagtgctggactcgagggagacggagctgcatccaacgccggtggctcccgtggtgcctc

SEQ ID NO: 666 - protein, 329 aa, Zea mays
MMSSRAGSILLRHAGSRLFTAAAISPAAASRPLLAGGNGVPAVMLRLMSTSSPAAPTEAKDEAAKASKVGGDKKAVVINSYWGIEQNNKLARDDGTEWKWTCFRPWETYTADTSIDLTRHHEPKTLMDKVAYWTVKSLRFPTDIFFQRRYGCRAMMLETVAAVPGMVGGMLLHLRSLRRFEQSGGWIRALLEEAENERMHLMTFMEVAKPRWYERALVITVQGVFFNAYFLGYLLSPKFAHRVVGYLEEEAIHSYTEYLKDLEAGKIENVPAPAIAIDYWRLPANATLKDVVTVVRADEAHHRDVNHFASDIHCQGMQLKQSPAPIGYH

SEQ ID NO: 667 - DNA, 3232 bp, Zea mays
ccccctccccttgcatgccgcctgtagggggcactctacggtcgcagcggtgccccctacagcgtcccctacgcgccggcccccttctccctcctccagatatagtgtgtcactgtttatccccctaaacattgtgctgtgggtccacgagtaattgttagtagataaaaaattgatagttaatataaaaaatgatattttatagttgtagtgggatatatggggagtatttagggggaactgttgcgggagatgaaaaaatagagacaaaaataggagaaaaagtgatatagtgggaaaaatttagaagtaactgttgcggatagccttcacttggtggggacactcctaccgtgcctcgccccacttctagcctggcctagcctaacgtagcgaaacgtaagcatcccatagcctgacgtggcgcgctccagaaccacccgacctagccgccggtggccgacacgccgcatagccccctcccactccgtgcacagcgaccgaatagcccacgggaaactccccgccgccgcaacgtcaccgacgtgcgggccggggaccggctcggcgtatggcgcgctgacacgtcgtcacgcggcagaggcgggggcgccccgccgctgtcaccgatcgaccgcgcaagagtccgcgcgcgcgtacagcacggcggccggccggccggggtcctgtcgccgtcgccgtccgtcctgacttctggttctctcaatttcaaaaccgacgcaccgcatgctgtacggggctgggttggccactagcagcgctgacgcggcgggcccacgggaggtcgcgtcgattcgcagcagcgcgccgcccccctccccaccaccacgtcaagcggcgtgggcttccgcccctccctgcccgccgcgtgggcccccactcgcgtcctgtaaccgggatagcgtgagcacgtcgctatcgtccgtaacggcgaccgcgaccataagagaggaggcaaagccagcccccggcgggcggtaaccgcccccctcctttcaactcgctcgctcgttcgccttccatctttctccctctctcggcagtctgcagcaggccagcgccgtcgcgcatgcaggaggcgtcatcggcggcggcgggggccgagcccggccgtcgggcggcgcagcatcagttcgccggcgtggacctccggcggcccaaggggtacgcgccgccggcgccggcggtgagcgagggggacccgtgcccgcggtgtgcgtcgcgggacaccaagttctgctactacaacaactacaacacctcccagccgcgccacttctgcaagggctgccgccgctactggaccaagggcggcacgctgcgcaacgtccccgtcggcggcggcacccgcaagaagccctccttgtcgtcgtcgtcgtcgtcgtcctacgcggccgccgcggacgccgacaggcagcccaagaagaagcccgccagcaagaagcgccgcgtcgtggcgccggccccggagctcgccgccgcggccgacccaggcaagacggcacccaccacgacgacgacgacgacgacgacgagcgagatcaccacggagactggcgcgctggaggactccgactccctggcgcacctgctgctgcagcccgggacagaggacgcggaggccgtcgcgctcgggctcggcctctccgacttcccctccgccgggaaggcggtgctggacgacgaggactcgttcgtgtggcccgccgcgtcgttcgacatgggcgcgtgctgggccggcgcagggttcgccgacccggaccccgcatgcatcttcctcaacctcccgtgacagccacagacggtcacggcgccgaggcgtacgtcctcctgctttgctctgctctgcgcctgatgatgagtgcaaggaaatggagcgctttgattcttctgctattggttgcatctgctaattgatttagcagtggtggtaaggtacacgcacgacgagctgactgcgtggttcttggcttgggccttagtatatgatgatgatgatgatactagttgtatgtgtgacgtgagagacgatcgcgacgacgaccttgaattttagtttctgagatgagaaaggtcaactagtggcctctgtatgactttagttttactcatgaactcatcagatggctggctatggctgtggctgtggctaactcatcgtcaagtgtttctaccggctgcctataaactagactgagctcttgttggtctgggattcttccttgttcttatgataaagttctgttgtgctgtcatgcttgttttcttcttttctgtgaagaaaagatcatggggaaaaaacattctaaattcgtcttcctcggctctcaatctcatggtgcgcgcgcgcgcgcgcgtgctgtgtgtcccagagccagagtcgcaggggagcatggatgctgaaagctgtagttagcactcgccgccataatcgatccgccggccggcgacggcgatcgtggtgctgatcggttggcatggcatggcatggcaggcacgtctgctgcgactttgtcgcggcaagacgattcgccgggcggggcgctcggttccgttccagttccaggcgtcggaagaacattgtcagcgtccgtcgatgcccggcggcggtggtcgtgctccactcctgcggtcctgcctgtcgtcgtgacgctcgcatcgcattcggattcgcatccaaccaatccagtgcaggtgggtttgtcatgattacgagccgagcagtgtagaccgtccggcgtccaggccagcgggcaacgccacgcggcgggggggcatccggttcccgacgccatcattttcgcccgccgaagcctgcccgcccgcccgccggcgccgagtgcgactgcggtcccagaaaggaacccattgctaggcggctcaaccactgcgaatcttcgatgatcttcgacgggccgggaacaagtacacctacgcccacacgcccagtggccgcgcggcctggtgttccggttgcacgtcgacgtccgccatccacatctatggtggatcgtcggtgagcccgaggcgtcggcacgggtcgtggcgggtgtacgacgtcccgctcgcgagctgtcggcgccagcagcatcagcggctgctgccagtcgctccgtgcgtctggccgtctgcatgccggcggaggggcggcagtggttcggcgaacggggacgtataagactgaccgcagcggtctaccctaccgctcccc

SEQ ID NO: 668 - protein, 240 aa, Zea mays
MQEASSAAAGAEPGRRAAQHQFAGVDLRRPKGYAPPAPAVSEGDPCPRCASRDTKFCYYNNYNTSQPRHFCKGCRRYWTKGGTLRNVPVGGGTRKKPSLSSSSSSSYAAAADADRQPKKKPASKKRRVVAPAPELAAAADPGKTAPTTTTTTTTTSEITTETGALEDSDSLAHLLLQPGTEDAEAVALGLGLSDFPSAGKAVLDDEDSFVWPAASFDMGACWAGAGFADPDPACIFLNLP

SEQ ID NO: 669 - DNA, 4793 bp, Zea mays
tcaattcaaattcaaaaccctgttttaatttttatgatctcaaatataattctaatgtaaagataaatcctctttttattattatttaatccaccctctattatttaattatggaggtaataaatgactttattaagatttccttcctcattttctgttttcgaattaggtttccattcaaacccaagataaagtttaagaatttcaaatttaatacgcactcaaaattattcatgatgcgatatatttattctaactaatttatttatttgataaatgtttgaaatatgaaaccattcatatttttcctttatttttaggaaaatagtattttgattggggaacataaatttaaagttacttcaaacctactattcatataaataaatgattatggtgtatcatttaatgatatgcataatcatttagttgaacagaaaacttttctattacctattttctaaaataattctcggttttcaaaattcagtcctcaaattttcaacactcaagtataatttgagatatctgaattttactcttttatgtcctcttttatttatttatttattattattatttatacaatttttgggccttacatctcgcgtcaacaccttcgaacaagccgaaggtatcaatgtgatattccatatgtttatcatgaaataaagatatgaattgatacatgtatgaataatgcttatcatctatatgaatgcttatttccgcaaatgatgaaggtgtgtcattcatgaccttagttcgaataccattatatccgaaaggagatgatgcttcggaggacgaaggtctctaatctttaataattgtgttgtcttattgttaattcacagtatttgagaacaagagaccatcaaattctaaacacctctggctaacactctaacgaactgttagctagcttatagctaataattaatttattagttggatcaaactagctaataatttgttagttggctaactattaactttatagaggttgtagacagatcctaaagaaggtagcagccactattatttgggaaggaaaacatgcgcctagatggtatggtccactgcaggcagcgacttttgtggtcactcaatcacacctgtcactttcagatgcatgtggtagttctatatgcatgacctggtcgaattcttccaatgcaggggtcttggtcttggcgttaccgcgtcccacaaaagtcatccatgcccgcttgttactacaacctcaatcacaaccacaagagcaagaagaagaaaaatgaaacagcgccagccaatggcctgcaaccgccgccgcaagcttctctgcgcctgtttgctgctggcttgcgcagcccccgccgccgccgccgccgtcaacatctccgtctactggggccagaacagcaacgagggcagcctgggccagacatgcagcagcggccgctacgccttggttgccatggccttcctttccacgttcggcagcggccagacaccggtcctcaacttggccgggcactgcgaccccgcgtcgggcggctgcacagctctggccgcggacatcgcggcctgccaggcgagaggcgtcagggtgctcctcagcatcggcggcggtgctggaagctacaacctctcctccgcctcggacgccgagagcgtggccacctacctctgggacaacttcctcggcggcacctcctcatcgcggcctctcggcgacgcggtgctcgacggcatcgacatggacatcgagatcagtccgtccagccacttcgacggcctcgccaggaacctaacgtcgctgtacgggggcgacaggcgagggaggaagtacctgctcaccgcggcgccgcagtgcccgtacccggacgcctcgctcggcgcggcgctcgccacggggctgttcgaccacgtgtgggtgcagttctacaacaaccccgggtgcgagtaccagcagaaggacggagacggcgtggccaacctggcggcatcgtggaaggcgtggacgcagtcgctgccgtcgtcggcgtctgtgttccttggcctgccggcgtcgcctgctgcagcgggtagcgggtacgtacccccggacgaccttgtgtcgcgtgtgctgccggcggtgagcggctccgctaactacggcggcctcatgctgtggaaccgctactacgacaacagcaccggttacagtgcccggattctgagcagcagtaagtttgcgcacatttgattactgaatggttcacaaccagtatgttttagagaaagaatatcgatctaacaactcaaccatgcatcacagtcacagcggatcgaccaaacagctcgccagttccagggggctccggcgatgaatcgccaccgccggacaactcaccagctccgccgccgagcactggccggtcacgaaagagaaggatcaaaacatgtaagtagaatgaccattgcttaaccaaccatgtgggggcatcaccctttcgaatctcgagaatgaaatgaatgatttcactggcattttcagatatcatagcgggcaccgcaggcgtatccgggctgtgtgcaataatcgctctcgcagccttgatgtggtggtacaagagacgttatggcatggtaataccatggcgcagaggcgtatccggggtcgaatcctttctgcaaaagcaaggagctctactacacccgaaaggctacacttactcggaggtgaagaggatgaccaggtccttcgctcacaagctcgggcaaggcggctacggcgctgtctacaggggcagcatgcctgacggccgtgaggtggccgtcaagatgctgacgggcatgctggagggcgacggcgaggagttcatgaacgaggtggcgagcatcagcaggacgtctcacgtcaacatcgttactctggtagggtactgcctccagggtccaaagagagctctcctgtacgagtacatgcccaatggctccctcgagaggtacaccttcggcagcagcagtggagaagacgccttgagctgggacaggctgttcggtatcgtcgttggagtcgcgcgagggctggagtacctccacacgggctgcaacacccgcatcgtgcacttcgacatcaagccgcacaacatcctgctggaccaggacatgtgtcccaagatctcggacttcgggctggcgaagctgtgcgggcagaaggcgagcagggtgtccatcgccggggcgaggggcacggtagggtacatagcgcccgaagtcttctcgaggagctacgaggcagtgggcagcaaggctgatgtgtacagctacggcatggtggtccttgagatggtcggagcgaggaagaatgtccatgtcagtgctacagacgacggcggcaacagcagcagcagcaggtattttccgcaatggctgtatgaaaacttggaccagttctgtcgccccacaaccacgagcaacggcgagatccgcggtgacgacgacgacgccacggaagtgctgctcgtgaggaagatggtcgtagttggactgtggtgcatacagtccaaaccggacagtcggccgtccatgggccaagtccttgagatgctggagagcaacgccgccgacctgcagctgccgccaaaggccttgtgcaccgcttattaaaccgagtccgatcttgtaaaaactctagtccagcggcgtaatgcattcattgcttacctgctatagatagatactactgattcgagctcattgttcttcactccaccacgtcctttgttctttcaaagatgacctcgtgggtctatcttttgcactctttttgtgaccttctatgctgcttgcgctggctttcagtagagatgttctgtgtgcgctgagacagacagcacctcgaccctcccttgcacatccttcaaccgctccttacacgagtaaataaaacattatccacctattcttcctacgatcaggcagagatacctcccacacaaactggagaccatgattttttcccccacacatttgagtaggcacccaagcctctaagctacgtgatacagaacaaagatgatacccaaaaccttttacactccctctgacattgtgtgcgctgccccccacccccaccattcaccctcaacacacactcacaacaaccttttacccactatatgacattgttttcctatattttttcccctggaattgctcaagtgaaaaagggaacaccgagtacaaattccatacgaaaattaccaattcacaaccatcatgtgatgtaggaataaccacagagaacaagaaccagtagacttacaatagaaggctgagtagtgctcaattcatcctttgaaaatgacaatagcattccattcgccgatcttacccataagacctggaaaattgggttttggtgcagtgaaccgcgccctaagtggtgcccgctttatgggtaagtgctctgtgggcttcttaataacttttacagcctacaagactaaagtagttttaacttacagagcatgccacaaagtagttacccagatcaaagaccaacctgtattcaggctaccaatcacgcccctaactgtccaggctctttatgctctatagctcctgataacttttagaaacagaagaaaaatagagcgagatgctagctagaggaactttaactggccaaagtagccttacagcaattacaatgttccatatgcaggtaatgctgacaagtttttaactactatgctatataaacatacaaccaataatcatttgttgaaatatccaaattcaaaatcaaggtgtattac

SEQ ID NO: 670 - protein, 767 aa, Zea mays
MHDLVEFFQCRGLGLGVTASHKSHPCPLVTTTSITTTRARRRKMKQRQPMACNRRRKLLCACLLLACAAPAAAAAVNISVYWGQNSNEGSLGQTCSSGRYALVAMAFLSTFGSGQTPVLNLAGHCDPASGGCTALAADIAACQARGVRVLLSIGGGAGSYNLSSASDAESVATYLWDNFLGGTSSSRPLGDAVLDGIDMDIEISPSSHFDGLARNLTSLYGGDRRGRKYLLTAAPQCPYPDASLGAALATGLFDHVWVQFYNNPGCEYQQKDGDGVANLAASWKAWTQSLPSSASVFLGLPASPAAAGSGYVPPDDLVSRVLPAVSGSANYGGLMLWNRYYDNSTGYSARILSSITADRPNSSPVPGGSGDESPPPDNSPAPPPSTGRSRKRRIKTYIIAGTAGVSGLCAIIALAALMWWYKRRYGMVIPWRRGVSGVESFLQKQGALLHPKGYTYSEVKRMTRSFAHKLGQGGYGAVYRGSMPDGREVAVKMLTGMLEGDGEEFMNEVASISRTSHVNIVTLVGYCLQGPKRALLYEYMPNGSLERYTFGSSSGEDALSWDRLFGIVVGVARGLEYLHTGCNTRIVHFDIKPHNILLDQDMCPKISDFGLAKLCGQKASRVSIAGARGTVGYIAPEVFSRSYEAVGSKADVYSYGMVVLEMVGARKNVHVSATDDGGNSSSSRYFPQWLYENLDQFCRPTTTSNGEIRGDDDDATEVLLVRKMVVVGLWCIQSKPDSRPSMGQVLEMLESNAADLQLPPKALCTAY

SEQ ID NO: 671 - DNA, 6963 bp, Zea mays
ccaatccttggacttcttctgttcctgcttgatgcatgttcaactcgaattttagactttttaggatttgaaaacaattttgctatgtgttcatcttcagttttgagtgatcagtaatgctgaagattcaaaaaatataaaatttcttcttttcttgagtaaacctacatactataaacttgtactgatatgtttttatcattggaatagcctggtttgccgctcttgcaacaatatctgtctcggtttgagaaattagttatggagctcatgccaaaattgggagaacactttgttgaataaatgataaaccgaagcatgtatggaagccggtggtttatcacagttttctcatgttccttcccatttcatctaactcttagaattttggaagcaagatatttggatgctctgctttttctgtagctgatcctacatcttgtatagtctaacatttcgttctttcttggaccatccgtttatttaactgaggataggagtggatagagacttctcggattacaatatgtttgaataactattccattaaaaaggtctacttgtgatatataaaaattgtagcaacacacaattatctaactatatttatattttttgaggtatgtaaacatccccttttagtgatgctaataaaaagtgtcgaataacaattagtgtttttgtatatcaatatattttattatagtgctttcttatcttaatgtatcttagcattacatgttgaccccgtagcaacgcacgggcatacacctagtatatatataaaaaagtgccaaacttgcaatcctccatcttctaaaataaagaacatagcacgaggaaattggcaagcaagtccatcttcagcgtccatctgagacattttttattgcaaaaaccagagagtgacttttttttgttttcaaaaccgcggctgtggtcggcggccccccggtctccttccactcgctttccggcgggcgactggcctaaaatcgcctcttgtttgtttgcttccgtcgtcccctctccacgtagagcacgcccccggaccaccttttataagcaccaaccatctggccttgccgcgccgattcgccacgaagccgcactgtgagagagggacgcggcctgttgtcccggcttttagacgcaacttccatcgctgcgaagctatccattcgtgttcgtcatggccgccagcgtcaccgtggaaaacctcaaccccaaggtgagatcgccgcccgttttctcccccttgtctagctttctggtccttgaaggtcccattttttatggatttttcggtgggaagtttgggttttaacgagatggaggaggctctgtggatcttctgcgtccctctgcgtgtccctgattcagcttagccgcgggttggactctcgtgtgattgagaaatttggggtgaaaagattatccttgatttggttgagcggtacaagtcgtgcttagttcttgttcttgatgatctgattttgatttatacttataaatcaaacgataaaatttttaggataattgtaaccactgcaccggcgcaaagttacatcgtttatatgcttgcaataagtgcagttccttatacccagatcactagtcgctaactcgctatcgctatctctcaaccaagagttagatctcagcgcgactgcgattcgagctgctatagtgccttttctttttgttttgttttgtcgtgagtcgtgaccgaatagtttaagtcatctgtcagtatccttttccccctttgactcaaaaggggatatggcgatttgtttggactgctgccccacttctgttgcacaatatatataggttgatgctgtattgtttctgtgagatctgactatctgaggtactactttgttggcaatctgtgctttgttactaaacctattttgtaaacctgctgaatgtcgtgtgatcatgatttccatctgtttcaaagacaacagctttcgtgctttgcttctctgggtaaggcgagtgtggcttctcatgcctagctaatacactaataactattacaggtcttaaaatgtgagtatgcagtccgtggggagattgtcatccatgctcaggtatcttgactactgatgttcaacaaggcttgcagtctagtacttcagtatgttatatatcactgtgttcatgttcccaaagaatcgtttattcaccttatcacaaggcaatacagttaaatcaggcaatgttcttatagagttttgttagactgttgtagtaatagtatttgcttttgacactgctatctgacaaagaacagcatagtgcagtacctgaatttacaaacatgtatttgtgttagagcttactttatagctttcgaagtctattttggtacaggaaagtaattaagcatgtagtctacttgattgctaataaccatattgctttattagtaatttaatttgcaattgttccctgatgaaattcttcctaattattgaaggtcaataatctttttcaccatatattatatgtctcattgtgaatgcttttaattaagaatcttgtgcgctccatgccattggcagatctgccattaaggatctgcttcgaaattgatttaatgtagccccattgttttttctgttaacagcgcctgcagcaacaactacaaacacaaccagggtctcttccttttgatgaggtacctaactgttgatttaaaagttcattgaaagtgcctttatctttcctttttttttcaaaaattatatagtccgttccaattatatttgtacccttgcagatcctctattgcaacattgggaatccccaatctcttggtcagcaacctgtgacattcttcagggaggtatgtgtttattttaccttcagattccacctttgtttcttctatatttacatggtaccttgcaggttcttgctctttgtgatcatccgtgcctcttggaaaaagaggaaaccaaatcattgttcaggtgaatatcgtcatcattcaatttacagaactcctaaattcagagatctagtgcgtgatatcctgctatttttcccaacttcagtgtcaaagcaacctaaaaattctaaaaaatacagagatagggcaatctgtcttcctttaaaatcaaagctgtggcattttctttgaaattagtaaacatttatataaatagtaaaatttcctggagatctgtcaggtatttaactttttcccttcaacttccacagtaattaaacatacctaggaagatagttttagagttctcatgtttaattgatctgttcatcagaagaaccattacatcattgcctaattatgcatgccctttaatttttcctaaaatttcccttgataccatttcaagttgcaaagatgattttttttcttcgtactgtttaatatttttgttagccataaactttcaaaagtagttcagtgtcccatttatacataaattcttatgtgtacttgatgggtcgtctcactgcagtgctgatgcaatttctcgagcaaagcagattcttgcaactattcctggaagggcaacaggtgcatatagtcacagtcaggttggcatctcactctgatatatttattgaccacaatgagagaggagtcttggcttcatttgattttttaatgtttcctagggtatcaaaggactgcgtgatgcaattgctgctggaatcatgtcacgtgatggattccctgcaaatgcagatgacattttcattacagacggagcaagtcctggggtgtgcatttttaacttctctttcaattgtcctggacattttctgaataaacatgatatcactgaagtctcatcttgaccttattcttccttcttaaggtccacatgatgatgcaattactgattaggaatgagaaagatggcattctgtgcccaattcctcagtaccctttgtactcagcctccatagctcttcatggtggagctcttgtatgtactttcatttgctcagcagaagaatatggtctatagtactaaatattgtatcaatgacacctaaaatcgagcgcatgttctttcaggtcccctattaccttaatgaaaaaactgggtggggtttggagatctctgatcttaagatgcaactggaaaatgctcggtcaaaaggcattgatgttagggccttggtggttatcaatccaggaaatccgactgggcaggtttgtaccaatcatttctcctctctcgttaaagaacatctctgcttgcttagatattctatttcctatgcacaacatactctttataattgagtgtaattacatgaagtgtgtatttcttgtactcccgtttttaagttagtgaatactttgtatacttattttgtttagggaaaactttttgagtagaaaaaatgtggtttttatcattctgacttctgaaatctgaatgaatgctttttcaaggctggtgaccaaaacacaaattttattgaagtggttcatttatttgtaggttcttgctgaagacaaccaatatgatatagtgaaattctgcaaaaatgagggccttgttcttctagctgatgaggtgagtgataggcaagtagctgatgttagacgtcagaacaacacaaaaaatttgccacgcctctaacactaatgccattttcattgttaggtatatcaagagaacatctatgtggacaacaagaaatttaactctttcaagaagattgtaagatccatggggtatggcgaggatgatctccctctagtatcgttacagtctgtttccaaaggtaaatttatataaccagctactttatctgccttttggccaagtaactggcttatccaaaacattttgttgctgcaaccaggatactatggagagtgtggtaaaagaggagggtacatggagattactggcttcagtgctccagtaagagagcagatctacaagatagcttcagtgaacctatgctccaatatcactggtcaaatccttgcgagcctcgtcatgaatccaccaaaggtctgccatatggaattctttaaattacgccctggttggaattaggaaatgccaaatcgtccagttaaaaatcattgctttattctccaggttggagacgaatcatatgcttcctacaaggcagagaaagatggaatccttgagtctttagctcgtcgtgcaaaggttagcctggttgcatttccactacactcgagtgtcttctttaaaaatattcaagatttttcttttgttcgttttacaggcgttggaggatgcattcaacaagcttgagggattttcatgtaacaaggccgaaggagcaatgtatcttttccctcagattcttctgccacagaaggcaatcgaggctgctaaagctgctaagaaagcgcctgacgctttctacgctctccgtctccttgaatcgactggaatcgtcgtggtccctggatctggatttggtcaagtgagtcaactcaacctttacatactgtaatgtacttgtgcgcctggcctgtttggttcgtggcgcatcggatagtgggttcttggcgatgcatttttcatgtaaatcagtcacagctacttcatttcatgttaacccggtcgtaacgatcgacggtccgctcctttgctggtacttcgcaggttcctggaacatggcacatcagatgcacgatcctgccgcaggaagacaagatccccgcggtgatcagccgcttcagggctttccatgaggcgttcttggccgaataccgcgactaaactgttacgctgtgtgtgagttaagttggaggttcagtagaactgtagaagagctcagtgacagcgcagaaagaggcagtgttagaaaggcttaggtccttcttcacaggagcaacagttgtcttgtctcatcaaggagaaataaaaattttagttttacaacttctcattgacactgttgggttcttgacatggtagagaattgtgtgcactgtgcctggcactgggtcctactagcggcgcaatttaagcgtgaccaggatggcgccatcagccatctctgtcgatattacactgctagctgaaaatgccacttggtccctttcaggtgtttgtggacctaaacctaagttgtcttccttcaggaacttgtggactgaaagcaatagatgcgacctgaatgacggttctttgtggatctaaaagcaagaccaagagactagttatctgactctcaaaattagctctctcattagttaaatttagctagtcatctgactagtaaaactagataaatagtctgttagagtaagatgctatatatagagagtgtaatatttttgaaaagataaatataaagttaaacaaagagccaaacataaatagtctattggagatgctataaggctaatcacaatggagattttatgaggtgtttcatatattaactattggagatgctataaggctaatcacaatggagattttatgaggtgtttcatatattaattagcctgccacattagttattttgatgacatgtcacatcatttaagaaaggaagagttttatgaggttttatggggataaaatcatgttaacttgtttccaaggtcttagaaactgtgtgaaacctctactgagagcgttttgtttcatattcatataattaagtaaatcttactggttatttatatgcagcatttaaaaagtttgttaacatatgaaatagtgagatgaaactctttattgagatgttgtttcatttattcataaagctgatgtgacatttttagaaatagggacataaaattctcactgtgattagcctaagcaagccaaactcaactcgccacacgatccgatttacgatacgacacagtttggtggggtagtagtaattcttcctacgctttaaacgcccaccgttcgcctggattccggggattctccaattcctgcatgcatctccatc

SEQ ID NO: 672 - protein, 482 aa, Zea mays
MAASVTVENLNPKVLKCEYAVRGEIVIHAQRLQQQLQTQPGSLPFDEILYCNIGNPQSLGQQPVTFFREVLALCDYPCLLEKEETKSLFSADAISRAKQILATIPGRATGAYSHSQGIKGLRDAIAAGIMSRDGFPANADDIFITDGASPGVHMMMQLLIRNEKDGILCPIPQYPLYSASIALHGGALVPYYLNEKTGWGLEISDLKMQLENARSKGIDVRALVVINPGNPTGQVLAEDNQYDIVKFCKNEGLVLLADEVYQENIYVDNKKFNSFKKIVRSMGYGEDDLPLVSLQSVSKGYYGECGKRGGYMEITGFSTPVREQIYKIASVNLCSNITGQILASLVMNPPKVGDESYASYKAEKDGILESLARRAKALEDAFNKLEGFSCNKAEGAMYLFPQIHLPQKAIEAAKAAKKAPDAFYALRLLESTGIVVVPGSGFRQVPGTWHIRCTILPQEDKIPAVISRFRAFHEAFLAEYRD

SEQ ID NO: 673 - DNA, 3691 bp, Zea mays
tcattgcctgctagcttctctatttcaagtcataggacataggagtccatgtcagctgctgttgatctagctagagagatcgactaaagatcgactaagctgctatggattctatttttcaccggtagactcatgaatactatacggcctcatcgttatgggctcctagaacacccctaaatctggtcggtagatatacgatgaacaacaatatagaggaaacctatctatctaataactgcgttcgtacgtatatgttggcccgtccgaactcgttaaaacacacatcttctcttacaacattctcacgtgtaggcgatgtatcagcagaagcaagcatataatgtaccatgaatgtatgactaatccacatcatctcaacgacctcgtcttcgacccatcctgttcgctgttgcggccgttcgactgcgggtacgttacgcctagctagctaggtcggcactctgaattattgtctgttcctttccttcctatgagccaggaatgaacagtacgtgctttagtcgtcgttgctactagccccggccggcctcttcccaagctgcagtggccataaggagacgcggcgatcaggccttccttaattttcttctgttccatcctcgctctacctgcctgctgccagtttcaactctccaaggtcaacgccagccctcgcgcgcttggtgtactctagtttagtacaccaatccgcatgcattcttttttgtttgtttgtttgtttgtttgttttgattgacaaatatatgcggcagagttaagaacgaatcgactccgtcgtctcggctagtcgaccgtacatatccacgacctccaaaggccgccaaaacacccgatccggccagccttgtcgtgtcatcgtccagttagatgtcaactcccatctgaatctcctcctccatggcggctttcctataaatacgtcgcctttccatgttggatgtcattccattccagcaggcaacagcagctatagtttccaagggaaagggatacatcacctgctgctctagctctgctatagcgctagcagcaatataatggcggccgtcggcgccccgggcagctctctgcacggagtcacggggcgcgagccggcgttcgccttctccacggagcacgaggaggcggcgagcaatggcggcaagttcgacctgccggtggactcggagcacaaggcgaagagcgtccggctcttctccgtggccaacccgcacatgcgcaccttccacctctcctggatctccttcttcacctgcttcgtgtccaccttcgccgccgcgccgctggtccccatcatccgcgacaacctcaacctcaccaaggccgacatcggcaacgcgggcgtggcctccgtgtcgggctccatcttctcccgcctcaccatgggcgccgtctgcgacctgctgggcccgcgctacggctgcgccttcctcatcatgctgtccgcgcccaccgtgttctgcatgtcgctcatcgacgacgccgcgggctacatcgccgtcaggttcctcatcggcttctccctcgccaccttcgtctcctgccagtactggatgagcaccatgttcagcagcaagatcatcggcaccgtcaacgggctcgccgccggatggggcaacatgggcggcggcgccacgcagctcatcatgccgctcgtctacgacgtcatccgcaagtgcggcgccacgcccttcacggcgtggcgcctcgcctacttcgtgccgggcctcatgcacgtcgtcatgggcgtcctggtgctcacgctggggcaggacctccccgacggcaacctcaggtcgctgcagaagaagggcaacgtcaacaaggacagcttctccaaggtcatgtggtacgccgtcatcaactaccgcacctggatcttcgtcctcctctacggctactgcatgggcgtcgagctcaccaccgacaacgtcatcgccgagtacatgtacgaccgcttcgacctcgacctccgcgtcgccgggaccatcgccgcctgcttcggcatggccaacatcgtcgcgcgccccatgggcggcatcatgtccgacatgggcgcgcgctactggggcatgcgcgctcgcctctggaacatctggatcctccagaccgccggcggcgccttctgcctctggctgggacgcgccagcaccctccccgtctccgtcgtcgccatggtgctcttctccttctgcgcgcaggcggcctgcggcgccatcttcggggtcatccccttcgtctcccgccgctccctcggcatcatctccggcatgacgggcgccggcggcaacttcggcgcggggctcacgcagctgctcttcttcacctcctcaacctactccacgggcagggggctagagtacatgggcatcatgatcatggcgtgcacgctacctgtggtgttcgtgcacttcccgcagtgggggtccatgttcttcccgcccagcgccaccgccgacgaggagggctactacgcctccgagtggaacgacgacgagaagagcaagggactccatagcgccagcctcaagtttgccgagaacagccgctcagagcgcggcaagcgaaacgtcatccaggccgatgccgccgccacgccggagcatgtctaagtctactactaataagatggatcgatccatcatccatgttcacctgctacctacctctacgtgtatgccttgtaacgcgccggaccggagcacttgtttgatacaaaagcacatgttaccaacacatagttgagatgtgccaacgatattcatcatgatgagtgattaccaaaaagatatcatctttggtttacagttgactaatcttagcatgagtatgggtgatgttgtacagcacgtctcttggcttatggtgtgtactaggtggatgaccgtacgttgctacggagtcaacatgtaattataagatacattgagatataaaaggactatgataaaatacattgatatgcaaaaaataatgattgttattctatattttagttagcatcaagtggatgtttacatcatcaaaaaatatagtacaatacccatgcgttgcaacgatatataaattattcaacaaaattttagtgcataacgattacgtgaaagcgaacaacacaaattattatcgacctcactgtcttacatattccatgtgtggctctcactgcatgtccggtgacgtcaccccacgccacggcaccgtcgtgaaggagttgagatctacggatgtgggccccatgtgcgactgtctagaggcgagccaagggagggccgcacacatcccagtttttgtttggttctgttaaggacatgcttagtaagctccaaaaaagttgatctaacataagaattagaaaaattaaaatagttaacagaagatgttgtggtttatgtgattttagtaccaaagatggcagacaatctttggtatccacaaaatgagaagggtcacatccttcaaccacaattgatggtaaaaagttgtctcccatgagccttgagcaagtaatagtaaagcttatttgttccaattgaacagatgccacataccagtgattggttcatagtgaccttgtcactgatgtctttctttttatctaatccataattcttttaatttgaatttccattactttgaagtcgctaggtctgtgctctcagatgca

SEQ ID NO: 674 - protein, 524 aa, Zea mays
MAAVGAPGSSLHGVTGREPAFAFSTEHEEAASNGGKFDLPVDSEHKAKSVRLFSVANPHMRTFHLSWISFFTCFVSTFAAAPLVPIIRDNLNLTKADIGNAGVASVSGSIFSRLTMGAVCDLLGPRYGCAFLIMLSAPTVFCMSLIDDAAGYITVRFLIGFSLATFVSCQYWMSTMFSSKIIGTVNGLAAGWGNMGGGATQLIMPLVYDVIRKCGATPFTAWRLAYFVPGLMHVVMGVLVLTLGQDLPDGNLRSLQKKGNVNKDSFSKVMWYAVINYRTWIFVLLYGYCMGVELTTDNVIAEYMYDRFDLDLRVAGTIAACFGMANIVARPMGGIMSDMGARYWGMRARLWNIWILQTAGGAFCLWLGRASTLPVSVVAMVLFSFCAQAACGAIFGVIPFVSRRSLGIISGMTGAGGNFGAGLTQLLFFTSSTYSTGRGLEYMGIMIMACTLPVVFVHFPQWGSMFFPPSATADEEGYYASEWNDDEKSKGLHSASLKFAENSRSERGKRNVIQADAAATPEHV

SEQ ID NO: 675 - DNA, 2983 bp, Zea mays
ggctgcctgcccaccgtgatggcaaggcttgcttgcttgcgtgcctgcgtgtggcagcgacgaggttgaagctacggcggtggctgcttgcctgcgcgcgtgctagcacggcgacgacgtcgacgctgatgctagcgttgctacttttgtttttgttttctctgtgcttgcgatgatgcagtaaaataaacgtgtgtatctcatgtgattgatcgacgtgtgtcggcgatttcaaatcagtaacaatcacatgtgcatccccatcgacttcgtgtcggcgataaatctgctagggatttgtgcttttcatgtatgtgcttgaatagagaggaaagaataatattacataaaatatgagttcaacatctttcttaataccttttgctcgatctccttagtagagccacgtgcgtgataacgtgttaagaaccccttgctaccgagtgtagtccaagggctgcttaactgaataatagtagaacacaaggagacaagagtgtagagaggaactgattctttgttactatatggtgctgctctccaaaggttacatgatatggggatcttctctctatttatagacaaaactagggtttcaggcatatgggccacataggccttcctggcccaagaaaggtttcttaacactaccatcttccaggcgcggtcgtgcgtgcttcaactccttccctccgcctccagagcggataaataaatacggggtctacggtgcacgcgcacgcatggtgcgccgaggggcatctctgcccggggaatgcgcgcaggccatcgctcgacacgcacgtacgtgtcgcccccgcgaggcctcctcgcacacgcgtcgcgccgcacgggcgccgagggaccttgcaattcgtccgcgtcggtgcacacgtccctggcccggcttgccggctttgccctggcctcgcgcgcgacgtgccgcgtctccccaccggacggctataaaaaggcggcgccacctgatcctccatctcacacaagcaaagcagcagcaacagccaacacctaaactaaagaacagtagtagtccctgtgtacgtctagcaacgatccgcaccgagctcgccagttttgctcgttagtttggggacggcgatggcgtccggtcaggaaagcagggaggagctggcgcgcatggccgaggaggggcagaccgtcgtccccggcggcaccggcggcaagaccctcgaggcgcaggagcacctcgccgaaggtttgtatcctacggccggccggccttgtgatcctcttatcttcctttcacttgtgtgtgctataaacccactactactgcgcgtaagtagccaagaagaactgatcatcaattaaacgattgtgttggtctgttcgtgcagggcgcagtcacggcgggcagacccggagtgagcagctgggccatgaggggtacagcgagatgggcagcaagggcgggcagacccgcaaagagcagctgggccacgaagggtacagcgagatggggaggaagggcggcctgagcaccatgcaggagtccggcggcgagcgcgccgcccgggagggcatcgagatcgacgagtccaagttcaggaccaagtcctagatctgatgcgtgcccccgcttagcatgtagtacgtagctgcaggaatgtagtgtcgtcgtagtagtagggtagtcgtacgacgtgccgctcctcgtttggcacgtgtgccctgaataatgtagtgctgtcagtcgtcgtcctagcacgcgtgtaggagaccatacgtgcgcgtatgatcatgcgtgcttcgcttcagttaggttctgatgttggtcgtcgtcaccgtgtttgaagcaggcaggtctcttcaggctttgtcgtcgtagcagcctgtgttctagctctacgaccccatactcatagcgtgtggtggtgggtcgtgatgccttaaggtctccgagtttgtatccgtgcttgtttcgttaaggtagtttggttcataactcaaatcttctctcacttatgttcgactacattttgtttggagtctctccgttcatatacaagaaagggaaggatgtagctagctagctattctgccacaagagagaaaccagaacggaacggaaacatataacagtagcacctcatgtggcagaattgttggttttatgcctgctgcctcaattttacggcttcactgagtttggacattcatctttctatcgacgagaatgcctaatcaaactagctaggactcaataaactgcaatctttactagcacataggggtctgttctggctcgggaaaaactaaccaaactttaaggactggtttgagaatcccaattttccaaaaactacccaaaactctttaagctctttaaaactagtttggaacctcaattttcccttaattttctaaggaatttctattttttatagaaaaatgaactaattttcattggaaaaatataaatctcttataaaattgggcccttataaaattagggttcccaaactagcccagaaggaactatcacattaaaaactacctagctctaaaaaaaactaccacattaataaagttttggacagctaaatactagtagttgcctcattaattagggtatgtttgatagctctaacactaaaaaaaccaattgcctcgttagctcattagtctgtttgatagctcttaacactaaaaagagcttgcctccctctgaagattgtctgactccgaaaaaccgaaactaaaatctaaataaaaaccgaaagattgtctaactcaaaaaaaaatgaaagattgtctaactcttaaaaaactacgacagtagagtcggttcgcactagttcagatctaccttaaagcaactctaactagatcccactgatgttgtgaaaactgtttgagagctaattaaagcagatgccttcgagcagctccaacttagatctaggatcccgtgcaaatccaccgtagagcagctctaact

SEQ ID NO: 676 - protein, 113 aa, Zea mays
MASGQESREELARMAEEGQTVVPGGTGGKTLEAQEHLAEGRSHGGQTRSEQLGHEGYSEMGSKGGQTRKEQLGHEGYSEMGRKGGLSTMQESGGERAAREGIEIDESKFRTKS

SEQ ID NO: 677 - DNA, 2866 bp, Zea mays
aaaaaaatactcgacaagtgtcaaaaataaaacactcggcaaagagcttctttgccgagtgttttgttttaccgagggtttttgcgtgacactcgataaagagcttgtttgctgagttccgaaaaaaacactcggcgaaatatttagcattcgacgaagagccaaattttattagtgatgagactaaaaaactgtttagttcgtggctaattatattatactttatttaaggttggttgttgtaatcgaagaactaacgttagatatagggcccctttggtagggcttatttttcagcttcggctctggctcatgcaaaagttatgccaaacacctctttttcaaatggcttcatcaatgaagtgctttttcaaaatgaactagagggcatgagccaaaaaaagtggctcacccggcttcagctcacgtcatttttgcacaatagccctcccaccagtccaaattatttttttggtcctgccctcaatccctagccacgcacaatagccctcccaccagtccaaactatacaagggtctttctgaaaaataacctataagccgttttgccaaatgaattttcagaatggctttggctcatctaaagaagtggcttcacctcgtgagccagagccaaagccgtttttggagaagccagagccctgccaaaggggcccataataagccgtagaaccaaacaatcccgaagctcaccagctactcactctagagtcctgctcctgccacagtgccagttgcgcctcacgcagccacgcaggaataggataagcactatactacgcacgctctggcttccgcttcgtagatgcatgcgtgtcgccgccggaggctctcgccgcgcacgcgtcgcgcgctgcggtggtaacgacttcacggggtgtcccagcgtagcgtccgcgtcggcgcacacgcgccggcgcctgcccttgcggcgcaccgcccatcagctgctataaaagggcggcacaccgggtctgagtagtcgtcatcaacgacagccccagacaacactcaccgatagcaagtagcgccgccgacgtttcgagagcagagtatccaagctagccaagcgcgcacctcggtgacctagctagttcaggcgacgatatggcgtcaggtcaggaaagcaggaaggagctggaccgcaaggcccgcgagggcgagaccgtcgtccccggcgggaccggcggcaagagcgtcgaggcccaggagcacctcgccgaaggtatatatagccgactgcggctaaccatctgcatatgttaattcactgtcgttggctttaattacacgagtagtgtggctacctgatatgttctgaaatgttgcttgcacgtactgagtgattgcctctacgtttgcagggcgcagccgcggaggccagactcgcagggagcagctggggcagcaggggtacagcgagatggggaagaagggcggtctgagcaccacggacgagtccggcggcgagcgcgccgccagggagggcgtcagcatcgacgagtccaagttcaccaagtagtcctatcgcgtgcgtgcgtacgcagcgttcgtagctgtctgcgtagtgtaccttggccgtagctagtgctactctctactttggagtagctgaatgataataatgtagctagcagcatgcatgtaggcgatcatacatacgtacgtacacaggtacgtgtgtgtgatcatgtatgcttccagaagggtatcctagcttaatcagtcacgtcgtcaagtcgtcaatatggcaggttcgcgtcagggctttgtagtttgatagcctgtttcacgactcctcaataatcaagtagtgtaatgaaagtttggcggttccttgttattatctgcttgttgtatctcctgctctgcactagttaatttctcccatattgtggtagtaattatcatgtcgtcatcctcaacttttaggactagtttagttctggaggagaaccagagagattggagggcagggctagtggctttcaaactagcctttaacccttctcaattcttctaaacttttcttacgggccgtttggatcttcactcaataaaaattcatataattcatataagcctatattaaatttatggatttatggggatggggtgtaggataagaaatgatggtattagtagaatttatttctattctgtaacttctttttatagtaaagcatcttactaataatagtataaaaaatatcttatttagcttaattggtgacatttcacctcacttctttatattaaaaatgtagcacataaatatcatcggcatcctattaataatagtatacaaaaatatctcatttagcttaattgatatatgcctaatgtataataatagtataaaaaatattttgcataaaatgagattagcttaattgatatatgcctaaatacattagtacacacttcggcattttgctaataataatatacaaaaaaatattttgtataaaataagattagcttaatattgatatatgtctaaattattattattagaatgaaattcaattttaataatccaaacagggcgttaagggaatttttaaaattctggttgtcaaattttacctttcttgactatattttatggtaaaactacaattatagtcttagcatggcacgttctgctagcgggtacggttggtataaaggtcctgctagataaatcccgtgttatcccatagaacgggtagcaatctgccttgaatttaagccattcgtcttgaatcttagccgtcagatctactagctaggaaccacgtgatagcagagagattctgtcaacgttctctggataattttgccgttttgcgggacagagattc

SEQ ID NO: 678 - protein, 91 aa, Zea mays
MASGQESRKELDRKAREGETVVPGGTGGKSVEAQEHLAEGRSRGGQTRREQLGQQGYSEMGKKGGLSTTDESGGERAAREGVSIDESKFTK

SEQ ID NO: 679 - DNA, 7511 bp, Zea mays
gcatgcagcccagaggcaaagtggacgctttttagggttggtgccccccctcctcctctccaactactcacgcacttgtaccgtctcgttaaatgctgctggcctgccgctgcacatgaggaagcttttctcgccatgccagggtacggatcgtcgcccgtgcattgttgttgtggtagcagcacaacggaatgcggctgtaattcataaattctggcgaataaataccgtggcaggcccgctggatgtaagggcacggttaattgagtcacggtcatgtgcacaccagtaccgcgcgcgggtgtgtgtttgtgtttgtccctctgagatacagagtattctgcgcaccaaattagggtttgtttggacaatctcggattaaagtggattgaggtggtatggaacgtatcgaagtgtaatatgaactaatttctctttcaatccctccaatacacctcaattcacttcaatctctctttgcacaaacaaagccttagggatttaaaacaaccaaaagtgaggggaggggggacatagggcaacaaaattttatctgtatcagacaccttgcgatcaaggaaaaacaagctgatttagcaagtgtcagtgatcaagtaaaacaaggcaaattcgaaagtgtgaatatcaaacagtaccgttaggccgctgcctacgacttcctcgtctcagtgatgagaggctccacagtcgttgtcccttgcaaattgcaactgcaaagcgcggccctgcttgccggtaggaggagggtccccgccccggtttatagtaaccgcagcagcagcagcaggtttacgggcggagtgaagggaagccgcgccgcacccgcagtcactctcgccgtcgcagcacagcggcagggcagaagcggctgcccctgctgcgtttccgtccgtcgcccgcccgcccgcccggcgcccgcttctcttttgcccgcctctctctcttttgcatacgcctttcatctccaccccagtccccacccgcccgcaccgaggaaaaacttttttgaaaacaaaaaaccccccactcccacgtcccaccacctcgcctcggccgctgcgacagtgcatacgccccctcccctcctgactcctgttgcgtatacaccgtatgtgtctactgtgactccgggtcccgggggggtaagcgaccgagcaaggcttcgtctccggcggcggaggcggatctgggagggatggggaaccggataggcgggcggcgcaagtcgggggtggaggagcggttcacgcggccgcagggtctctacgaccacaaggacatcgaccagaagaagctgcgcaagctcatcctcgaggccaagctcgcgccctgctacccgggcgccgacgacgccgcgcccggcggaggggacctcgaggagtgccccatctgcttcctggtaagcacgcgcggggagatctccccccaccctcacgcacccccgatttcggcgtcggcggcgtcggcggcggcgccgtctgctgtggcgggaatgcccgaccacggtccacggttagagacctggactgaggggggaagatttcggcgggggggttactgggtccattggcgcctgactctgttggatttgcgtgtgccgttgccgcgattctgttactgactgggtggggggaggtcgacgaccgtgcacgcggttctagatgctgtgtgctctggaacctcctcctaggaccgtgggtttcagtacgcttagccacgtttctaggctaacagcacaattttgtcgactagttctgcaaagtgcagtcacggcggcgtcgtattttgtttgttctgtgcgcaggcgactgttaccttctgctctgcttctgtacgtgcattgttgttagggatattctaggggcttgttttaggaccagccgaacatttccgtgttttcaatgacttgagagtacttgactgttttgcctgataccccagagttgccaacaagtagtcaaaagcgcggtaacggtgggcatcattgttttttttttgttctgcgtatgtgtctgggatggtacctactgctcatgctctgctaggacatcatactgtatatgtacattgtgcaaaatgcgctaccatgttgtcctaagattgttatcacaccacatttgatgctttgatcatgttgtttggagaattttctgaattccttttggatggctaaccgctgtgctatatgaggttatgagtgccaccagtgccaccagtgccccattgattctaattcctggagcaacatggcttacgaatgttctactgttctactcctatgtgatggtagtgtggtaacaggcttgcacatcacttgaaatgggcgtattatacgagcctcgcaagaaactgctccagttccatgcctagttagctcagtaccagcgtattgggcacttctgtcttatggttgtatcgttacatcctttgtctaatcctcaatgtgaatctggttatgctcttgttatctgggatttttaatctcattgctattgcagtacacttaatgatttggttgcctgattggttgattctgttgtatggaattttgtttcttagatgttttcaatagctcgtggcgtttttttttccgcatctacatgtcttgttcagttgtttttagtgttactagttgggcaggacagcaagtactgcattttgatcactagcttcaaaagtacctcaggaatttggccaatgatagtgaagaataggatggtctatttggttcttagaagtattttggggttctggttagttggctgtttaactaatcagatagaatcatcagttgttttgtgcaagcactgtgttatctctccttgagcattttctaataagattgtttcaatttgttgcagtactacccaagcctcaaccgttcaaagtgttgctcaaaggggatatgtacaggtaatgcatgcatcctactgttgatttagccatcccacatctgcaaataacctttgcatatcctgtttggcatttttacagagtgttttcttcaaatgaaaccaactcatactgctcgacctacacagtgagtatcctttatttcatctcatcttagtttcatattatttggtgattacatgccttcttatgaaaaaaaaacttggtcgctgaaggtgcccattctgcaaaacgcctaattatgctgtggagtatcgtggtgtgaaaacaaaggaggaaaggagcatagagcagtttgtaagtcttagcctttaaatgcctgcatattccatttatgcattgccaacttctgtacagtctttagactgcaatctgcatttgctgtagcttatgtataacatattgcaggaagaacagaaagtcatagaagcacagttgaggatgcgccaaaaagaactccaagatgaagaagctaaaatgagaagaaaacagggcaggtgttcttctagcagaacggtaacaccaacaacagaagttgagtatcgagatatttgcagcacatccttttcaggttagcagtgggcataactaatatgctcatttaataatgctatctttctggtgtagtcttatcacttacacagccataatgtcattacctctgtagtgccatcatatcaatgtactgagcaaggaaatgaatgctgttcatctgaaccttcatgctctagccaggctaacaggcggcctttccattctagacacaaccggtatgttcatgctatctcttttatgtttcacatgaaaccattctatttttgtttgttgtaacttacaatttgcaacgtttaaatattacggaaacttgatcttttagttttacagtggattacatttaactgttgagatgaaatcgacatctaactactgtgccacctgtttttgctgacagtgatgataatgttgacatgaatctggagaacatgatggttatggaagcaatttggcgttccattcaggttagtggacaggaactagcaagatgcatgcagtacatgacttgaataatgctatgagtgctaatttatattggttttccaagagctgcacatagaccaacatttgcctaaaataaaactttaccagtttcagtgtgcaggatttgtagttaaagaaagcatggtgaagaccatgtgctctcttagaaagttacaacatctgtattttaaatagttatagcatatgtgctctcacttggaaaaaaaggattgtgtgctaacatgttgcatgttgataatcttttcacctgttgtgcaaatctcacatttgtttgttgtgctaacatgtgcatgtaatttgcagataagcatagtcatgctactgggtagtatagggtctatgagttctcctcgtccttcgcacttattcgctaaatagtcattgtcagcattagtatatccatttaacaaatactccctctgtttcaaaatatagttctttctagccttcttttttttatgttcacattcgaatggatgataatgaatgtcatacatacaaactacattcataggttaattaatgaacgcatgtttaatctaaaacgaaatatattttgaaacggagggagtagttcatattgaaatttagtcgttttctgtgatccagagttggatgttcatgttttcatttgccacggaatctcagctctatctgttttcggaatatcaagtagaattgattgaatttgttatggtgattgcacgagctaactttgcaactccagattgttagccaattatgtagatatcgaacatgatttgttatttgggtgctaatttagaggatagagtcactggcaaaatggttttgtggaatgaatgtagttaggtctgcgggataaaccaaaattttcttgcctgcaaccactacggataaaaaagcttctcgtatccataatgctggctaatacaaatatttgaggtaattagttttgagtactgccataatggggcaatatctaatatatgtatcaattatttgatatatgttatgaaatcttatggacgttcttgatactgcactatgggagtttgcttctgacaaaagtgccagatgtgcagacacttttggagcatgaattgacaactatgttttctttcatttcatttgaatagcctatttcaggatatttgaaggtcgagtagctaaactgaaactatagtggatatgctctgtttggtttaatgagttttgtgtacagttgtcctatttttataaagtcgatagtttctaaatattgcatcgtgttcccagttttgtgcttgttacttctcagtgcttgcatttgcatcctgcaaacgacaaccgaccattgacacccagctaacgtagaacacctgagggctggggtccagactcatcaagggcaaatgacactgctattacttatgaacaaccaatgcgtaaccatacatagtatcaactgatatgatctcaaggacttgtctgatcttagcaggcatctaagatgctcctaggcttcccattataatacttaaaaaatgcataaaggaaatgttttcataaaacagttaatggtaagattgatgagattcttcagaacaccttttgaaatcacttttttacttggatcaaatccgaacaataatttttgctttggaatttatgtatttgctaagtcaaagcaaactctatatctgtttcttatttgtttcattaccttagcaggaacaaggacatctagtaaatcctgtttgtggcagctactttcctgtaattgagccaccatcacgtgaaaggcaggcatttcttccggctgctcctctagaaatgcctcatccaggtggatactcttgtgttgcggctttggctgagcaccagccaccaagcatggatttctcttacatggctggcagtagcacatacccagtctttgacatgatccgccgaccgtgcaacatgtctagtggaagcttgtgcagcgtcgagaacagttcactagacacctggagcgggatggcaccaaattgcagcagaggagtggtaagagaggagggagagtgctcaaccgaccactggtcggagggtgcggaggcgggaacaagctatgccggatcggacatcatggtggatgcaggggccatgcaaccgctgcctttcgctgagaatttcaccatggctccaagccacttccgcccggagagcatcgaggagcagatgatgttttccatggccgtgtcactagcagaaggtcatcatggtaggacgcaagcgcaaggtctggcatggttgtaagttgtataacactaattttgacgccttgatccctgcccctttctgttggttcgacctgcttcccctgcacctctgcttttttgccactttgtttagctttttgctccttttttttcttttctttcttttttgcatgtgttgcttcatggcttgatatagatcttgctatagtcctccattgtcattgcttatatgtatgtaaaatggaatatgtggaaataggaaagaaaatgggtcgaaagttcttttgccggtaggatgcgcagtgtgttttcgcattgcaaagcattccaagattttgcaaagttgacctggaacaggcattctagctattctctccgttgacatgttcttggggtgtaaagatgtttgattctatgggaaaaaaacaactagactctggaccggctgaggttaatttcagacatgtttcgatctatttgtgaattcttctgatctgttgtagaactactttcagctgtagtgtatgacttgtcaggcagaggcaggcaacagcaacaccaatattatccagcctcacaagtatgtttttcttaaagggggctcaagtacaggtattttggcatggagcatgtcgatggaggatggacagactgaggacaatgtacagagatttgttgcgttgcacacgattccgcattccgaaccgtgaggttgacaaaaggagagaggatctcttcttggagaggaagcatcctgtttcttaacagcagttagcaggtgaggtgagaaaccttggatgccgacaccaatatgcaaagctggccggactgaaacacgggaattccaagttttgtcttattttccgcagaaacttacgcgaagcgaaggccaacaatggcttcaaatgcgttttgggggtaagaaatgaatgcagcttgtggcttgaaatgaggccatgagccaccgtgtgggaagggcaagggcttgcagttaggatggtagggcttgaaatggtaatgaattacgatctaaatatttttttcataatttatttaagcttttaattaattttagtttaaaaataaatagaaatagacctcggtcataattcgattcgatccttaaattttgtagtgtaaaatttagagctcattaccacctctatttgtagttgcacgtgtggacaactaggtgttgaaaattaggttcgggatctagctcggagcatcacaagtatctctaaaattaggttcgggatctagctcggagcatcacaagtatctctcccacatagc

SEQ ID NO: 680 - protein, 428 aa, Zea mays
MGNRIGGRRKSGVEERFTRPQGLYDHKDIDQKKLRKLILEAKLAPCYPGADDAAPGGGDLEECPICFLYYPSLNRSKCCSKGICTECFLQMKPTHTARPTQCPFCKTPNYAVEYRGVKTKEERSIEQFEEQKVIEAQLRMRQKELQDEEAKMRRKQGRCSSSRTVTPTTEVEYRDICSTSFSVPSYQCTEQGNECCSSEPSCSSQANRRPFHSRHNRDDNVDMNLENMMVMEAIWRSIQQEQGHLVNPVCGSYFPVIEPPSRERQAFLPAAPLEMPHPGGYSCVAALAEHQPPSMDFSYMAGSSTYPVFDMIRRPCNMSSGSLCSVENSSLDTWSGMAPNYSRGVVREEGECSTDHWSEGAEAGTSYAGSDIMVDAGAMQPLPFAENFTMAPSHFRPESIEEQMMFSMAVSLAEGHHGRTQAQGLAWL

SEQ ID NO: 681 - DNA, 6922 bp, Zea mays
gaaaagctctaaaagctataactcaaacaaacaagatcttagtctaggatattatttgggactgcttcacttagcgaaaacgaactcggcttcacaaaccactagccaaacagtaccaactttaaaattttcgcttcaccaaaaatgtgaagttacccctaacttcaccaaaaatcatgaattagctaaagggattcacgaatgagtaattttaactccctcttgaagttggggtaaaattgtccatctttgtcatcgattacacacctgcaagaaacgaaccattattttttctgttccctagctaccgtcgtcgtcttgttgtccggccgagccgcgccatggcgacgagtctcgaacagtgccgaccgaccggtggtgccacaacgtggtatagtgacggtcaccgtcgtcgcgtcagagagggtcgatgcgagcccctcgaactcgcggtagaggtggaggaatacgctgagcggcttgaagccgaggcggttcatggcccatagctgtggccatgctagccgcgtgcccgcctgcgaaattccgctactttaaagctaagctactctactttaaaacttacaacgctcagctgatttttgtgaagtagagcgatgccaattgccaaacaacgcctgagtaagtaatagcacgttagaaaagcaatctattgttgcaccacaagtccacatgtttagttgcaccacaagtttacgctcgtttgttgcctggcttgaacagtggccggagcccacaatgtttgtggtctagccggagagagaagggaagccgcgccgcactctctctcgcagtcgcagcacagcggcagtgcaggtgtgcagccgcagggcagaagctgctgcctgcccctgctgcgtccgtcgcgtgcagctgcagctgcagcgtgcggccccggcccgtcccgtccgcattgcctgcctttgcctttctctgcttcgtttcctccccaacaagtccccacccgtcccgcaccgagggaaaaaaaacttttttaaaaaaaaatcactcccacgtcgcctcgcccgctgcgacagcgcatacgccaccctcccgttgcgtacaccgtatgtatctacggtgactcggggggcacgcagacgcagtggggactggggagagcgagagcgaccgaccgaccgagcaagggtttcgtctccggcggctgcagcggagacggatctgggagggatggggaaccggataggcgggaggcggaagccgggtgtggaggagcggttcacgcggccgcaggggctctacgagcacaaggatatcgaccagaagaagctgcgcaagctgatcctcgaggccaagctcgcgccctgctacccgggcgccgacgacgccgcggccggtggaggggacctcgaccttgaggagtgtcccatctgcttcctggtaaacacgcgcggggagatctcccccttctctctcattctctcccgcaccccgcccccccccccccccccccccccccccccgcgggcgaattgcggctgcgtgcgcccgaccacgggcgacctggacggaggagggagcttcggcgcgggattactgggtcgattggcggttgattctgttggatttccgcgtgccactgccattgccacgattctgttactgggtggggaggtcgatgagcgtgcgtgcacgtggttctaaatgctgttctggaacctcctaggaccaggggtttcagtacacttagccacgtttctagcctaatagcacaatttgtcgactagttctgcaaagtgcagtcacggcggcgtcgtattcttgttctgtgcgcatgcgtcgttatcttgtgctcggcttcggtgtgtgtgtgcattgttgttagggatattctaggggctgtgtttccacaaggtcgtctgaggaccagccgaggtttagtacatttccatcttttcaatggctcgactgtttttgcctgataccccagagttgccaacaagtagtacaaagtgcagtgaaggtggcatcattttttggttctgtatatatgtctgcgatggtatctgctgctcatgctctaactaggacatcatactgcatatgtacattgtgcaaaatgcgctaccatgttgtcctaaaagattgttattacaccacattttatgctttggccatgttgtttggataattttcttggatggctaactgctgtgctatgaggttgagtgccaatgtcccattgattttaattcctggagcaacatggcttaagactattctacaattttatactcctacctgatggtaatgtagtaacaggcttgcatttcttgaaatgggcagtggtacttctagatgctcctgggatgggtgtattatacgagtcttgcaagaaactgctctggttccatacctaataattatctctgtaccaatgtattgggcacttctgtcttttggttgtatcattgcatcgcttgtctcgtcctcaatgtgaatgtggttatgctcttgttaactgggatttttaatctcattgctactgtagtacttagtgatttgattttgcctggttggctgattctgttgtatggaaatatgttcttagatgttttcggtagctcataaaaaatagaaatggtgttgattttgtttgcatttacatggcttggtcaattgcttttggtgttactatagttgggcaggtactccaactctgttgcattttgatcactagcttcagaagtacttgaggaatttggtcaatggtagtgaagaatatggtggtctattttgttcttagaagtattttgtcatttggttagttggctgttcaactaaccagatataaacatcagttgctttgtgcaacaccatattatttttctgagtcatttcctaataagattgttttcatctgttgtagtactacccaagcctcaaccgttcaaagtgttgctcaaaggggatatgtacaggtaatgcatccattgtactgttgatttagccatcccaacctgcaaataacctttgcatattctgtttgacattttttacagagtgttttcttcaaatgaaaccgactcatactgctcggcctacacagtgagtatcctttatgtcatcttgtcgtaatttcatactgtttggtgatttatacaagccttcttatgaaaaaaattgatcactgaaggtgcccattctgcaaaacggccaattatgctgtggagtatcgtggcgtcaaaacaaaggaggaaaggagcatagagcagtttgtaagtcttatcttttaaatgcctgcatcttccatttatgcatgtccagcttctatgcagtctttagactgcaatctgtatttgctgtagcttatgcataacatattgcaggaagaacagaaagtcatagaagcacaattgaggatgcgccaaaaagaactccaagatgaagaggctaaaatgaaaagaaaacagagcaggtgttcttctagcagaacagtaaccccaacaacagaagttgagtatcgagatatttgcagcacatccttttcaggttagctggatgtaactaatatgctcacttaataatgctatctttcttcgttgtagttttataacttacacaattgtaatgccttgatctctgtagtgccatcatatcaatgtactgaacaaggaaatgaatgctgttcatctgaaccttcatgctctagccaggctaacatgcggcctttccattctaggcacaaccggtatgttcatgatctctttgatgtttcacatgaaacctttcgatttttgtttgttggtgaaatcggcatctaacaattgtgccacatatttttttgacagtgatgataatgttgacatgaatctggaggatatgatggttatggaagcaatttggcgttccattcaggttagtggacaggaactattttgcaagatgtgtgcagttcatgacttgaataatactatgaatgctgatttatattggttttccaagagctgcacatagaccatcatttttctaaaataaaagtttactggtttcaacatgcagcatttgttgttaaagaaagcatggtgaaagctatatgttctcttagaaagttacagcatttgtattttaaatagttatatggcctctcttaggggaaaaaagattgtgtgataacatgttgcatgttgataaacttttgacctgtcgttcaaatcccacatttatttgttgtaatgctaacatgtgcaagccatttgcagaaagcataatcgtgctactgtatggggtctatgagtttttccttgcccttctcatttctttgggtaaatagtccttatcaacattagtatattcatttagcaaatacgtagtccatattaacctttagtgttttctgtgatccagaatttggttgttcatgtttttatttgatatgaaatctcagctctatctgtgtactgaatatcaagttgaattggtcgaatttgttatggcgattgcatgagctaaccttttgcaactccaaattattagccaattccattccttaaaagtgaaagggcctctagcgtaatggttaaggcttccgagtagcatctctaggtccgggttcgatcatcctcggggacgaatttcaggcttggttaaaaaaatcccctcgatgtgctctgcctgctcccgggttacgtcctacgcgccaccctccggctgtgccgttgcaaagtgggcggtgacggcccgctagtgatgggatgctagggttcggagattttcttggccgggaccatgtttcggtctcttaatataataccgagagggcgtctttccctctccggccgaacaataatcttggctttgtttttttttttgtatttgctaagtcaaagcaaactcttatatgtatctttaccttagcaggaacaagggcatctagtaaatcctgtctgtggcagctactttcctgtaatcgagccaccatcacgtgagaggcaggcatttgttccggctgctcctctagaaatgcctcatccaggtggatattcgtgtgcagttgcggctttggctgagcaccaggcaccaagcatggatttctcttacatgagtggcagtagcacatacccagtctttgacatgatccgacggccatgcaacatgtccagtggaagcctgtgcggcgccgagaacagttcactggacacctggagcgggatagcgccaagttgcagcagggaagtggtaagagacgagggagagtgctcggccgaccactggtcggagggcgcggaggcaggaacaagctacgccggatcggacatcatggcggatgcaggggccatgcagccgctgcctttcgccgagaacttcgccatgggtccaagccacttccgcccggagagcgtcgaggagcagatgatgttttccatggccgtgtcactggcagaagctcatcacggtaggacgcaggcgcaagggctggcatggttgtaagttgtaacactaattttgacgcttcggtgcccccctgcccccttcctgttgcgctgccgttccacttgccccgccccgcttctctgttttttattatttttttggtgccaccttgtttggcattttgctcttttctttctttctctttttttttttgcatgtgttgcttcatggcttgatatagatcttgctatagccctccattgccattgcttatatgtatgtaaaatggaatatgtggaaataggaaagaaaatgggtcagagttcttttgccggtagaggatggggcagtgtgtttttttcgcatcgcagagcattcttaatatcttgcaagtttgcattgtaaccattctcttccgttgacgtgttcttgggtcctgtaaagatgcttgtctgtatggggaaaaaaatgttctagactcggccgatcgaggctgtttttcagacatgtttcgatctacttgtgaattcttcttatatcttgtagaactggttccagctgcagtatgacttgtcaggaagagccaggcaactagggctggataacgagtcggcttgtccgagttcgagctcggttcggctcgttaagttaacgagccatagagtgagctcggctcgtttacgagcttgagctagctcgtttagctcgagatctagagcagaaaaaaaataatatgtatataataattatttttagttaattttaaactaatttaacaatagaaaatagtaattatattcataatttcacaaaccacgttaatgtaacaccaaattagcacaactcatcaattcatataaatgttcatcagtttaacctacaattatatttgcatagaccaatttaacatatagacatagttcattaattattagtttaactcattgtcatagacacctcatacatataacatgttcatcaattatttcgtaaatgatatgtgtatagtttcgtttcgcggggatgtggtagctcgtttagctcgtgagctggctcgttaacgaactaaaccgactcgttaacgaaccgagctaagatgaaaacttagctcatgaaaaaatttaagcgagccgatccgaaccgagccgagcttaccataagccgagcgagtcacgattattttgtccgatcctcacagcaacaccaatattatccagccgtaccgcaagtgcagatttttttccctagagctcaaggacaggtatattggcaaagcatgttggaaccggtggacagactgaggacagtggattgttgcacacgattctggggattcgaagccgtgaggttgacaaaaggaggaggctcccttggttggagaggaagcatccattccagctgccacggttccttgcaagaaggcgagagacctcggatgccgacaccaatcagcaaagctgtccggactgaaacgcgggagttccaaatttggtgcgaatttcgtacg

SEQ ID NO: 682 - protein, 430 aa, Zea mays
MGNRIGGRRKSGVEERFTRPHGLYEHKDIDQKKLRKLILEAKLAPCYPGADDAAAGGGDLDLEECPICFLYYPSLNRSKCCSKGICTECFLQMKPTHTARPTQCPFCKTPNYAVEYRGVKTKEERSIEQFEEQKVIEAQLRMRQKELQDEEAKMKRKQSRCSSSRTVTPTTEVEYRDICSTSFSVPSYQCTEQGNECCSSEPSCSSQANMRPFHSRHNRDDNVDMNLEDMMVMEAIWRSIQEQGHLVNPVCGSYFPVIEPPSRERQAFVPAAPLEMPHPGGYSCAVAALAEHQAPSMDFSYMSGSSTYPVFDMIRRPCNMSSGSLCGAENSSLDTWSGIAPSCSREVVRDEGECSADHWSEGAEAGTSYAGSDIMADAGAMQPLPFAENFAMGPSHFRPESVEEQMMFSMAVSLAEAHHGRTQAQGLAWL

SEQ ID NO: 683 - DNA, 5354 bp, Zea mays
taaaaattaaaaaatgtctctaatatatgtatttgagtatagatgacgtgatttagagaacgttgttggaaaggaaggatatatagaggatgaaatcttttagagtagattgtaaatgacggatatagagaatgaatatagaagacgttgctgaagagtgaagacaatctgaaatctgagaacatagattcccgtggccgtaggagtcaagagtcagagtcagatatggtggctgcctggctggtgggttgctgaacgcaccagcaagcgttgcgtccatcgtccatgcagagaacgaaagcacagtgggcaacttccagctgtgggatagaagatccctggcccccggaagatacctcgaatcttcagtcccattggtaggtccgtatgcgcggtaaaaaaaaagatggtgccgatgagatggcttccagcaggagcataattgaatccaaaaacaacttttaaaatcgaattgctgttatccgcagacatcggaaaagcttccaaatttccttcttttttttggcacccccctacgctcggaactcatatatcaaatcaaccacttctcgcgataaagctgcaccgccgaattcaacattttcccacgccaaccgctccacgcccccgagtccacatgtaactgacaggtgggcctctctaataggcaggtcccggatgtcagaagcaggagctggacgctttccctgtacgcgctggtcccccttttgtcgcacctaccgcgtcgaggaaataagccgaatatattatgcgcggaactcggaaggtgtaaccgtgtaacccggttgccgtggttgtaatcgtacgtgtaaagcgtacgcctacgtatttttactgcgatcaagggcgagccggctggacgccaacttgtttcgtatccctcggtcgtcgccaatatatatagccgccctcctcccggccgatcccttcgtcctcaatctcaatcccacaccaccaccaccacctcctccggtccccaacccctgtcgcaccgcagccgccggccatggcctgcctcaccgacctcgtcaacctcaacctctcggacaacaccgagaagatcatcgcggaatacatatggtacggcgcgcgtttccctgttaatctgcatgctctctctctctatctatctctctctctctgcctcactagtcagaaaaaagaatcgatcttgctcggtgcccccagccgccttctcatggcgtctccccgtcgaacaacgggatttgggatttggtgatgaggggggtctctgtttttttatttatttcggtgatcgagtggactttatttgtttgttctccagttttaaaaaaaaaaatctgctattttggctcgattattcgcccatgaatatttggcttcagtttaggatatgcttcaagagacggacagatgcagccctgtgcccctgtacctcttgtttgtcctgctgctgctgcggcagtctgtggccctgtgctcaccggccaccgcgccgcttatatggtgttattactgtaccactggccaccgccagatgacctgttggctaaaagacctaatcgcacgtcttacctcttacgcgttaattgacccccccccccccccttgtgctagtattagtacaccaaagatgcatgattttgttgttagaaacacgtcttggagtgctctgctccgaggaatatggtggccagtttgttctgttcagtttgttgttggcgatttgatcctatattaatgcatgccttttcgggtggttttcaggatcggtggatctggcatggatctcaggagcaaagcaagggtaagataagattcccagcactagtaggaggaccttgggatacttatcacttatatatctctgaagtcgtcatccgctgagctggtctttggcttatataccagagctctgctcaccactaccactgcaaacgatttatttttttcttctatttcgtaaaaaataaaaaattcatactgatctggtggttgttggtggtgcatggtgctggtgcagaccctctccggcccggtgaccgatcccagcaagctgcccaagtggaactacgacggctccagcacgggccaggcccccggcgaggacagcgaggtcatcctgtagtaagtgtcatggcatgccaagcttggatgcgttcttttgtttgttttgttttgttttgttttactagcaaacatgggaacgatccttatctcttgggcatgtggcaccctgcagcccgcaggccatcttcaaggacccattcaggaggggcaacaacatccttgtaagtgtatacttgtaccatccaagtggcatgaaccatacggttccgtgttatctactgctactgttcattggtccacctcagatcagtttatctttgtgaagaagggaggaaaaaaaacgtgtcttgtttcaccaagtaaactaaaatccctataaatctccctttttaatatgcctgatgcataggctgaagtatcttgatgcagcactagtggttcctgatgcaaatcctttaccctgaacctttgttcaggtatatgcaataacgcgaattttataacacgatgacattggttgctatgagcttgtatagatatttttttttgtagttaggtgtgatcacccagtgtaccaaacccaaggtttaggaatccaacaattggtccttccctctcagcttgtctaacagtagggaccagttttaaggtgctgaacagtgaactggtttgacccacaggtgatgtgcgattgctacaccccagccggcgagccaatccccaccaacaagaggtacaacgccgccaagatcttcagcagccctgaggtcgccgccgaggagccgtggtatgcaaatctctctcccctcccctcccttcccttccccccggtatatgtggcgtaaagctgaaacgatctacatctactacccctgactgactgactgaccatgatttgatttgttctttgcaaataaatggcaggtatggtattgagcaggagtacaccctcctccagaaggacaccaactggccccttgggtggcccatcggtggcttccccggccctcaggtacacatgacatgatcaccgcttgcgcttcacggatgaatttgcttgcttgcttgccgaagacaccaccggttcgatgacaaagtacgccgttcgctctccgtgtttttagggtccttactactgtggaatcggcgccgaaaagtcgttcggccgcgacatcgtggacgcccactacaaggcctgcttgtatgcgggcatcaacatcagtggcatcaacggggaggtgatgccagggcaggtgagagtgtgagacgctgctgctgacagcttcttctgtatccctgaatctaccatttttctgaccatggcgaaacactggttggttggttggttggttggtttcagtgggagttccaagtcgggccttccgtgggtatttcttcaggcgaccaggtctgggtcgctcgctacattcttgaggtatggttggttgaccatgtatgtatgtaatttatgtaacgaaaacgaagcatggacaatgatgcggtaacctgtgctcccttttgtttgtttgtttgtttttttacagaggatcacggagatcgccggtgtggtggtgacgttcgacccgaagccgatcccgggcgactggaacggcgccggcgcgcacaccaactacagcacggagtcgatgaggaaggagggcgggtacgaggtgatcaaggcggccatcgagaagctgaagctgcggcacagggagcacatcgcggcctacggcgagggcaacgagcgccggctcaccggcaggcacgagaccgccgacatcaacacgttcagctgggtacgtacgtgtcttgtccctccccctggagcctggaatctcggctccgagaacctgcgcccaactgatggatgttatgcgctgcgcttgtggcggtgcagggcgtggccaaccgcggcgcgtcggtgcgcgtgggccgggagacggagcagaacggcaagggctacttcgaggaccgccgcccggcgtccaacatggacccctacgtggtcacctccatgatcgccgagaccaccatcatctggaagccctgagcgccgcggccgttgcgttgcagggtccccgaagcgattgcaaagccattgttccttccgttccgtttgcttattattgttattatctagctagatcatctgggggtcaggtcgtcgtggtgtgccaaaacagaacacagaaagaggaagaagaaaaaaaaaacaagacgtgtggcgtttatgttatatcatccaataatggccgtaccacacttgtggtacctttcagtacgtatgcttgcattgtatgaggggtcgctttcctacgccctaccatgtctgtggctttccttgcttggtgatgcgatatggagggaatcgttcgtcagtgccagtgggcggcagcattattgtcatcgtcgcccgattggatgaataaactattattagcctgttttaggtcagaagatctgtcgtctttccccccgggaaaaatcacggtcgacgaacctatcactcttgatcggttgaggtgtcactcgcgatagcttggctgcttagcacaggagcgagggaagtggagagcaagcgaatccatcacgaggccttggaccaataatttctcccagagcaggacgaactgtaggagctggaaattcttctgatcggatcatctgctccaactgcaggtacgtatgatatcttgcatgctctgttctttaccgtgtcaccaacccactacacctattgcgaccattattccacctatacggccaacaaactatataccgagtaaaacgctatacagtgatttacacagagagcagagcaggtaaccatttaatctatttaataaatgttcaagctaaccccgatcgcgacagagggattgggttggccattgctttcttgacgttttattgacatcgttgacatgcacggcaccttcaccaacccccccgcgacgttgcacaggctgctcaacgcaactactcgccttgattgggcgacgccgtctgttcaagccaaaggctggcgacccacaatggtacactagactacgggggtgcttcaagagaccaaaaataaaaataaagaaaatgcaatcggcaatggaaattactacaagagagtttatatccataaattaaaaaaatactactggatatttagcttttgctcttaaggagatgagttacagcttcttttttgaaattaaacttgactggctccaagctaaatagttgctaaaggttctctcgatgatacaaagaggaaggctcatgaatag

SEQ ID NO: 684 - protein, 356 aa, Zea mays
MACLTDLVNLNLSDNTEKIIAEYIWIGGSGMDLRSKARTLSGPVTDPSKLPKWNYDGSSTGQAPGEDSEVILYPQAIFKDPFRRGNNILVMCDCYTPAGEPIPTNKRYNAAKIFSSPEVAAEEPWYGIEQEYTLLQKDTNWPLGWPIGGFPGPQGPYYCGIGAEKSFGRDIVDAHYKACLYAGINISGINGEVMPGQWEFQVGPSVGISSGDQVWVARYILERITEIAGVVVTFDPKPIPGDWNGAGAHTNYSTESMRKEGGYEVIKAAIEKLKLRHREHIAAYGEGNERRLTGRHETADINTFSWGVANRGASVRVGRETEQNGKGYFEDRRPASNMDPYVVTSMIAETTIIWKP

SEQ ID NO: 685 - DNA, 5132 bp, Zea mays
tatatatttaatatagtataattataaagctaattttttagagacgaagactggagatgaagactaaaagacgggacataattattaaacctaattaattaaacatctatataatactcgtaattgatattcaaacgtttaatatgacgtgaactaaattttttagtaaggtaagtatttacagtacatgaatagttttagtttgtactgccaaattgtatatggcagtgggagtcactattctcatatatggtatatggtggctggtgggttgctgaatgcaatgcaccgttcgcccatcgctacgctacatgcagagaaccatcaataaagcagtgtgcggcttccagctggagtagaagatccctggcctcaggaagatacctcgaacctccagccccattcgtatgtccgtacgtatacagtaaaaatcattttgcagctggtgccgttgagatgggcatgggcttaggtaggagcacgattgaataaaaaagattttattaaaaatcatttactactccttttgggactatccccagacatcggaaaagcgtccaattttctttctttttttcaccccctatgctcggaactcataaatcaaatcaaccacttctagcgataaagctgcccccgccaattcaatatttcccccacgccgatctctccacgtccgagtccacgtttaactggcagtgggcctctaacaggctcgtcccgcatgtcagatgcaggggcttgacgccttaccagtacgcggtgctccctcttctcgcacctaccgcacggaggatatgacctaatacaattaatttacgcggaactcgaaatgtatccgtatttatacgtgtggaacgtacaagtatacgtattttgttggttttttttttactttttacccggctggacgccaaccaactggtttcccgtccttggtcgtcgccattatatagccgccctcctcccgggccgatctcttcgtctcaatcccacgccacatcctcccctccttcctccttgggttcccagcccgtgcgcccgcctgtcgcagtcgcaccgcagccgccggccatggcctgcctcaccgacctcgtcaacctcaacctctcggacaccacagagaagatcatcgccgagtacatatggtacggcgctcgtttccgtcggccgccctctcatggcgtttcccccgtccgggaacggggttgggagaggggctctggctctgtttttttttcctgatcaagtggcttcatctgttcattttccgagtaaaaatctgttatatttgctcgcttattcgcccatgaatatctaacctgagtatcgggtaattccctgcccacgggtccctcaccggccaccgcgccgcttatacggtgttgtcgctggccaccgccagatgatctgttggctgaaagacctaatcggatgtcttacacgttaattgatccccccctgatgccagtattagttcccaaaagaagcaagtttttttttgttgttaattgttataataaacacgtctttggattgctctgctccgaggaatatggcgaggagttgttcggtttgtcgtcgacatgatttgatcctatcttaacgcgtgccttttttggggtgcaggatcggtggatctggcatggatctcaggagcaaagccagggtaagataacagattcccagcactgggaggaccccccgggatactggtggttgtgactcgtcgtcacctatcacttatccctgagctcatccgctgatctgttatttggcttatacatacatcagagctctgctcaccactatcactgcaattatttttgtttctctgttctacttcgtagtaaaatcatactgatctggttggttctggtgcagaccctcccgggcccggtgaccgatcccagcaagctgcccaagtggaactacgacggctccagcaccggccaggcccccggcgaggacagcgaggtcatcctgtagtaagtgtcatggcacgccaggcttggacgcattcctttctgtttgctttactgaacgatcctttctcttgggcatgtgctgcagcccgcaggccatcttcaaggacccattcaggaggggcaacaacatccttgtaagtttgcacttctaccatccaagtggcatgaaccatacggttccgtgttatttactgctacagtgcctactgttcattggtccaactcagatcagttcatctttgcgaagaaaaaagaattgtgtcttgttgcaccaagtagactaaaagttgtacataccctacaaataaattagatttttttttaaatctgcctgaactatcttgacgcagcaccagtggttcctgacgcaaattgttttaccctgaacctttgttcaagtatatgcaatattgcgaattttataacgcgggtgacattgttgttatgagcgtatatagatattttgttttttgtagctaggtgtgatcactcagtgtaccaaaccatggtttaggaatccaattgtctaatagtagtaggggccgcatttaggtgttgattgaactggtttgacccgcaggtcatgtgcgattgctacaccccagctggcgagccaattcccaccaacaagaggtacagcgccgccaagatcttcagcagccttgaggtcgctgccgaggagccctggtacgcgaatctctctcccctccacctccaccgatatctgtgatgaaaggctgaaacgatctatctctgacgatgcttgtttcttgcaaataaatgacaggtatggtatcgagcaggagtacaccctccttcagaaggacaccaactggcccctcgggtggcctattggcggcttccctggccctcaggtacattcactaatttgcttgcttaaggcttcttctgtcgaagtttgaagtttcacctaaatgacgtccactgttccgtgcttagggtccttactactgtggaatcggcgcggagaaatcgttcgggcgtgacatagtcgacgcccactacaaggcctgcctgtacgcaggcatcaacatcagtggcatcaacggggaggtcatgccggggcaggtgagcagcgcgcggctagacctggcaaaaaccttgttctgtatcagcttccgtctttgttgaccatggcgttgcggctgggttggtttcagtgggagttccaggtcggaccgtccgtcggcatctcttcgggcgatcaggtgtgggttgctcgctacattcttgaggtacgacgccacgtctttctctgggctagaacatttgtaggacgacgccgtctcgtcttgtcttgtccaagcatgtgtgatttgtgcgctgcattttttttttgtttacagaggatcaccgagatcgccggcgtggtggtgacgttcgacccgaagccgatcccgggcgactggaacggcgcgggcgcccacaccaactacagcaccgagtccatgaggaaggagggcgggtacgaggtgatcaaggcggccatcgagaagctgaagctgcggcacaaggagcacatcgcggcctacggcgagggcaacgagcgccggctcaccggcaggcacgagaccgccgacatcaacaccttcagctgggtacgcttctaattgtgcaactgctgtaccgtggaggatcggcgaaacccgtgtgcctgccaactgttgttgctttgtgccgttgcagggagtcgccaaccgtggcgcgtcggtgcgcgtgggccgcgagacggagcagaacggcaagggctacttcgaggaccgccggccggcgtccaacatggacccctacgtggtcacctccatgatcgccgagaccaccatcgtctggaagccctgaggcaccccgtggccgtgtcgtgtcggtttgctccgcgtacggcgctggccgttgcatcgcagggcccagcggttgcgcaactattttcccttccccgttctgtttgcttgtactactactctaccgctagtcctgcatagcattttagctagaacacaacaacagccaaaaaaaagtattgttgcttgcttcgacgcttgccaccacttccattccatgccgtccgtccgcttccttcctgtgtaatcctcctccaataatagacgtgccatgttgcatcctctattcctctgcattgtataaaagtggtgtaattcttttgctacgcctccaatgtctgtggcttttagctgctgatgcgatgtcagattctgtcacggacgattcgtttcttttccttccgataattcagcgccgccggtcatctgacactgacatgttcttccgtcgacgagctggcggattactgttcatcggttgcggtgtcacgcgacgcgacagcttaatgattggttgttaccgtggcgtacatgttgctgcagctacagcagccatcaagcgccccctcggccctctctcaggtggtcgattggtcggatcagactgtctggtcgtcgaatagttccccgtgttcattcgtctgatcggatcatctggttggaaagcagggacccgcaacacgagcatgctaccgtctcgtccaagctctcgctatatattcacgaacccaattattactactgcggcagaggagaggatgggcattgctttcttggcgttggttcacatcgttgacctggcgaccacggcgccttcaccaactccggcgacattactgcacgggtacaaccaaaccactactctcgccttggatggcggcggcgtcgtcttctcttctctccgatctggtcggtcaaagcctgacagcggccggcccaggccaaccatcaccgagaggcaaattgaaagcattctcaatccagccagtgtaggaaacgtccgtcctggggcggacgtacgggacggcggggagcctcctagccagacacggacggggcggcggcgactaggcaaacatgtcgctccatcctcgccggctccggagtggccgattacaggaatagctggtggaaagacgataataggatacctaaatatttgctgctgatggaagcaaagcttgtctgctggccgtgtgtggcatcggcaagaaagatgggtattgtttatcatgatggtgctgattcggaatcctggctagatgtcatatttgcgtacgaaaca

SEQ ID NO: 686 - protein, 356 aa, Zea mays
MACLTDLVNLNLSDTTEKIIAEYIWIGGSGMDLRSKARTLPGPVTDPSKLPKWNYDGSSTGQAPGEDSEVILYPQAIFKDPFRRGNNILVMCDCYTPAGEPIPTNKRYSAAKIFSSLEVAAEEPWYGIEQEYTLLQKDTNWPLGWPIGGFPGPQGPYYCGIGAEKSFGRDIVDAHYKACLYAGINISGINGEVMPGQWEFQVGPSVGISSGDQVWVARYILERITEIAGVVVTFDPKPIPGDWNGAGAHTNYSTESMRKEGGYEVIKAAIEKLKLRHKEHIAAYGEGNERRLTGRHETADINTFSWGVANRGASVRVGRETEQNGKGYFEDRRPASNMDPYVVTSMIAETTIVWKP

SEQ ID NO: 687 - DNA, 11222 bp, Zea mays
ggttttattgatgcctgactttagcaatcactctatattttgatctatctttttttataagtttgactttatgagacttatttttagaaacttgagctcacaaattttgtcttatttggtctctgtatgatggaattatgtcattttataatctctgttcattcatcagtcattgtgaacttgtgaactctttctaatcgctcacttcattggtcgtgttgtaccaagacatattgcatggagtaaacaataacatcaattagccaaatcaaaaaaatattataaagagagtggagacaatcaataaaaaatcttgaatttttttaatgaatagtttacgtaggtattattgtaagccgtcgcaacgcacgggcaaccgactagtataatttaaaggatgagttcatgcttacgtctagactagttggatcgacaagtcgcctcacatgctgacaacaagttaaactaactttttaaactcactaaagaagcgggctaggctaaactaacctcgactcgtcacttgatcgaaagcgagagacgactcggactcgttcccaccctcgcgagtcgcgaccagctcaaaatcaactagcggccggacggcagcggcggcgcactcccgttcgggtccggcggaatccacctcatcacgtgaacttggcagaatctccgtgcgcgcgcggtccaagattctgaccgccccgctcctaaacccacgttgtgtgtaccccccaccttcacccaatggcgaggggcccccacatatattagagccccacacatcagtggctctggacagcccgtacaagcaaaagcaccagccgcctagtggtgggagcgccaatagagccgccaactacacattcgacggccgagatgccgtgattacctgcgaagccctaattaaatcaccattccctgcctaaaactcccatttcgccgtccgtgacgcgagagacctcttcgcatcccgaggcggcgcttttggggtcggaagcgacacgggcgccgggcgggtccgcgggtggtggtgctactgctagcaagcagcagcaggcgacgctaggcgagagccccagtcggagcaggccaccatgtgcggcatcctcgctgtcctcggcgtcgctgaggtctccctcgccaagcgctcccgcatcattgagctctcgcgcaggtatggcgcggcaccccaccgtccgtcttgccgtcccatatccatctgtgccttttatgtggcttaacgcggccccgcccccgccctgctatcgggtgggttgttggcgtattgcggccgtctgaggagagggcggaggaaatttggtgtcgggttgggatagtacaacacctttgggcaaacgggatatctctagtttatctaaccctctgtagtccgcttgtcgtttcaatttatattaacatctgaaaaggaccaccgatatgtggccaacttttgcaaaacatagtatttgtctccgagaatttgggaatgagctatgatgattgatgaatggtagatgtctatttttttttccgagggcccatgtagcgcgacatggtgtgtctatgtcgtgagagaaattggcaggaccagattttcaaaatgcaaactggtatctgcctatatagatggatttttgtggggttacagtttaagtgtttgcttcaagtttgaaatgaatacgtgtttttcatgaatagtaatgactgtatacatgtacatttcatctgcagaatggctttaaatgtaaattatttgaatttgagtaaaatgtagcatgtatagaactatagatacacttgtatggtgtttggtttgagaaataagttagtccatcatcttctcactcctcacttttttgtttggtttgtggaatgaaatgagttgatccatcaccacctcatttctcatagttagttagttagtactaatatgaggaatgaggtttccaccaaatttgaggaatggacttatgatgcaccaccttgaatgaagtgattcctcaaaccaaacaccccttgatgttcagcaacaatcttctagggtttatctgctagtgcttgtggtggcaagtgtggaggttttggttcacggttcctcttgtggagattatgatttcaaacacaaaacttgctccttccagttgcaaattaaaatattgcaaaacttgcatacataaattacaaatttagattatataactgggtcacctaaaattatctttgtcaatgatttatatgactcatttagcaaaccagaagaggagtaaaagagaaaaaaaagttgcctagaagtgtcacagtggcctatgattagagaaaaactgagaagcagcagtttttataatttatagaagcaattaatgttcagttgcgcactattgtggagttactgacttaatcttctagtagagtaaataggtgttgattgtagacatcttattgaaatctgaaatgagaactatatgtctcttgacttcaattagtataatttctttgtgcttttttttgtgacagaccgttcttaagaattacagggtgcttgttataaatttgttatacacatgcaccccactgaaatgaagttcatattttgttaggttacggcaccgagggcctgattggagtggtttgcactgtcatgaggattgttaccttgcacaccagcggttggctattatcgatcctacatctggagaccagcctttgtacaatgaggataaaacagttgttgtaacggtctgtatctggattagaaataattttactgtatccactcatttttttatgctaactgtagagtttgcaacaaatttgtttaattgttctgcttttggtaaatgtcatttgtttcaaaagtctgtaatgcccataaatagcgatctaagaaatcaatcaaacaatcccaataccatgaattagaaacttcccagaccctgggaggattagcgaatgcccttaatgagctgagtgtgacttaatgtgctatgatatgaacccaccagaagtcttgctttaactaaatgaactagaggaaatatggttctatttgtgtatagttatttcaccatttttatcttctggttgtcatttccaggtgaacggagagatctataaccatgaagaattgaaagctaagttgaaaactcatgagttccaaactggcagtgattgtgaagttatagcccatcttgtaagttgcatatttatacccttttaacagtgacataacttttgccaacgatttcattatctccatcgaagcatcagcctctcttataaagttatttaatgttggcattgagaccttttaatctctttaatatttctttacacagtacgaagaatatggcgaagaatttgtggatatgttggatggaatgttctcctttgttcttcttgatacacgtgataaaagcttcatcgcagctcgtgatgctattggcatctgccctttatacatgggatggggtcttgatggtatgtaaaccaaagctgattgctttgtccctctgaagaaaatcatgcatgaattatgtttttgattcatttcacaaaacagaacttctaggatcagtttcataaaacttgcatccatttcaaaacttgcaacgatttgcatgggcccactatttgcgttgttttttgattcacttcacaaaacagaacttctaggatcagtttcataaaacttgcatccatttcaaaacttgcaacgatttgcatgggcccactatttgcgttgctggaaggtgggtccaatgaaggtttgtggaactgagggcacaaatagttgtaccatgaaacggatcctagcaggaactggccagttaccgcgaagaacctcctggcatgtagcatgttctctaggtcctggaatagagaaaccacacaaaaaacacttaaatttaaatttgcatgctgatctcttaatgaaacgaaatatagaaacaccagtagctgtccatttctgcagtacattgaaaaaggcaacagactgggaaatattcttgatctcaacaactggaattcaggttgtctgatgggacagttttaattgctgttatgcattagtacttgcaagctcttaggtaatgatgacttatgtgcacattgttgttcatgctagtatgagcgtagtttcttcatgcaattaagatgtcatattgactcttttggaggttctggttttgattaccagtctggcagcaggatgttcctgaatctgatatagaaccatgttaaaagttcattctgctgtccaaaagcaaaaaccgaaaaaggactatattatgttatttagggggctatgtacttatttggataagtgttcattccgctgatatttgatactccctccatcccaaattataagatgttttggtttttgtagatacatagctcttgccatttacatggagtcttggacatacactatgtctagatacataattaaaacgatatatctgtaaaagccaaacattttataatttggaacatagggagtatatctcgaactattattatttcttctttttcccaatcttgagaaataggcagtgtggtgtagcccccaactcaattcgtcactatatgtcttttctggattcagattagctgctacttgagattaattcatagtgtgctacgttatcaggatcagtctggttttcttcagagatgaaggcattgagtgatgattgtgaacgcttcataacatttcccccagggcatctctactccagcaagacaggttgacatatctagaagactatctcctatctcatcccacccataatccagaatagagttttcagatcctggagcaaaagtgcaatctaagccactacttatgtttcaaatttccttttgttttgccttctaacctgcttttttatccttcctaggtggtctaaggagatggtacaacccaccatggttttcagagacggtcccttcaaccccttacaatgctctcttcctccgggagatgtttgagaaggcatgtttccttcctgataccatgcactactttcatacttgttgatacctatctgttcactcatctttctctctctctgttttgttttacatcttttgacacatagttataatgcatttgatatatttatgtatgccatatttgctattagggtaactatttgaatgttgttccatcatttcatgcttatattatatgttaatgactttgattaagtaatgcctaattgcctatccgtaaacccgtcccacatggggtcttcgattccgacctctacgagccgtccgtaaaggtcaaacagacggagggggatcaggacaagaaggatgacggccaagctgcccctgcggcctagactcgcgagctggtcgcaacaaccgatcgataggattggcgccagccctcatcgatcgattatcggacgcagctctgctcgaagacgtgaccgaggccaggcggctctctctcaaggcgaaatccttcatgcttatcgacgggacgctctataaaaaaagcgccttcgggattaagcattagtgtattacactcgaggagggacaacaactgctcgctgaggtgcacggaggaacatgcgggcaccacgcggccccacgatcgcttgacagcaaggcgttcaagcaaggcttctattggcccacggccatggccaacgccgaacaggtcgtccgtgcttgcgaaggctgccagtattacgcacgacagcagacatgccagctaaagccctccaaaccatacccatcacctggccatttgcgatctgggggttggacttggtcggacccttcaagaaggtgcccggaggctacacccacttgatagtagcggtggataaattcaccaagtagatcgaggccaagccgatcgccaaactcaaatcatcagaagccgccgctttctttcgcgacatcgtctaccaatttggggtatctaactccatcatcactgacaacgaacccagtttacaggagagtcgttcctacagttctgcgacgacttcaacatccgtgttgattgggcagcggtgtctcaccaaagtgtaatggccatgtcgagcacgcaaacagcctaatcctacaaggcatcaagccgcgaatattcaacaagttgaagttcgctggatagtgggcgaccgagctaccaatagtgttctggagtctgcgaaccacaccgtcttggttgcggccgagctaccaccagttttcatcgacccattgaccgactggtgctcacgactgccgctgcttcagctcccttgcccccccttctccgatcttcactggcgccttgctatggcggagtatgtggccctgctagccaacctcacctagaacttggtgtggtgtcccctagcaccaatgtggtcactgacaaatggatattccgacacaagatcaaggttgatggtactttggattggtacaacgcccgttgggtccttcggggcttcactcaacgccacggagtggactacgacgggactttcagtcctgtcgtcaagcctgccactgttcggaccgtcttctcctagaactggacggtcccccagccggacgtcaagaatgtcttccttcacgacactctgaccgagatggtgtactacagccagctcgtcggcttcgtcgactccactcctccgggtatggtgtgtaagcttaaccactctttgtatggcctcaagcaggcgttgtgggtccggtacagtcgcttcgccatctacttggtctccctcgacttcgtcgaggactcgaggccaagtcggacacatctttgttcatccttttgggtgacgacgacaccgtctacctcctactctacgtcgacgacatcatattcacggcctccagtgtcgcactccttcagacacggtcgctgccctgtagcgctagttcacgatgaaggacttgggccctctccaccactttcttggggtcaccgtggagtgccgcgcctatggcctcttctttcaccaacgccattatgccatcgatattttggagcgggcttacatatccgactgcaagaattgctccatgcctattgacacacagacgaaggtctctgacgacgaggacgtcccggtcggcgatgtgactgcctaccggagcctcgctggggctctatagtacctcatcttcacccagctcgacatcgcctacgcggtctagcaggtgtgccttaatctcactattgctaagtggattcttcactacctctgcggcaccctcgactatcgccttcttcgatttttgagcgggttgaatacactttacaccgacgttgattgggttggctgccccgacacacgccggtccacctttgactatgccgtgttcttgggcgtcagcctcatctcttggtccttttgaagcggcaacccgacgtctcttgctccagtgttgaggctttctggttccgttagttcctccatgagctccatagccccctcgcgtgccaccttcatctactgcgacaacgttagcacggtctacctcttcaccaatcccgtgcaacagcatcacacggagtgtgtggagatcgacctccacttcatctgcgagcatgttgctgtaggcgatgtccgtgctctccatgtcccgaccttcgccgacatcttcacaaggggctcccatctacagtactatcagagttgcggtctagtctaaacatctgtccagtatatagttgtgactacgggggtgttagtgtgttatttattcctgtgtactctatatctgcaataggcctggccatatacttgggtatattaatatatcctctgccaccaattagggtcagggtttctattctatccaacacaaatattagttgattttgttgtgcaacgggaatttcagttgctgtgttgtgctgtagtcacaataatggttcaatgtgttcatttcagcagtagctgtgcgactgtttgtttttctgtatcattttgattactaatatattatccttcacttgtgcaaattctgcaggctgttattaagaggctgatgactgatgtgccatttggtgtgcttttatctggtggactcgactcttctttggttgcatctgttgcttcgcggcacttaaacgaaacaaaggttgacaggcagtggggaaataaattgcatactttctgtataggcttgaaggtaagtttcttgtttatcctcatcacagagcattgtgttcagttgagccatcattccagttctaacttgttttcctgttgctatgagtattttgacaatataagggatgtttattgggagtgatataaacagaaggaacaatgtgataaatttcttctgtttttttttcttttgtagggttctcctgatcttaaagctgctagagaagttgctgattacctcagcactgtacatcatgagttccacttcacagtgcaggttctcgattcctttttctgtacactacagcaaaaaacttttaatttaaatttattataaaaaataccaggagggcattgatgccttggaagaagtcatctaccatattgagacatatgatgttacaacaatcagagcaagtaccccaatgtttttgatgtcacgcaaaatcaaatctttgggtgtgaagatggttatttctggcgaaggttcagatgaaatttttggtggttacctttattttcacaaggcaccaaacaagaaagaattccatgaggaaacatgtcggaaggtaaagatatttttatgagtaatattatgtccaaagtttttggccaatcatttaagcagagtagtgcgggcatgttgcctctttcagttcagctgcttagacattcaatcttgctcacaacatgtcttttttatgctctttagataaaagcactacatctgtatgactgcttgagagctaacaaagcaacttctgcctggggtgttgaggctcgtgttccattccttgacaaaagtttcatcagtgtagcaatggacattgatcctgaatggaagatggtatgttgccattgttaggataatatcaagatatctaatatcactttaattcatttcttttattctaaccagcatgattcctttcttttgactattaacatgtaatttttagataaaacgtgacctcggtcgaattgagaaatgggttatccgtaatgcatttgatgatgatgagaggccctatttacctaaggttggaaaagttgctcttgttatttttgcaacgttactttttaaatcctatatgatgtaacttatgtaggttttattttctgtaaatagcacattctctacaggcaaaaggaacagttcagtgatggtgttgggtatagttggatcgatggattgaaggaccatgccagccaacatgtatgtcttctttttctttgttgaacctctcatgaaattggcccttgttgaacttgcagttgatgtttgttactgcttttcaggtctccgattccatgatgatgaatgctggctttgtttacccagagaacacacccacaacaaaagaagggtactactacagaatgatattcgagaaattctttcccaaggtttgtaagctgcattactcttgtaatgttattttggtctgcaattatccatgccttgccaaaaaaaacacaccttgttatttgggcctggaataatattcaccatgaaacagaagtctgtgccccacctacataactcttttgattattacagcctgcagcaaggtcaactgttcctggaggtcctagtgtggcctgcagcactgccaaagctgttgaatgggacgcatcctggtccaagaaccttgatccttctggccgtgctgctttgggtgttcacgatgctgcgtatgaagacactgcagggaaaactcctgcctctgctgatcctgtctcagacaagggccttcgtccagctattggcgaaagcctagggacacccgttgcttcagccacagctgtctaaccttatgtttatcacccagcaatgcttgaaacagcaaaggttgtccattgcttgtttcagtttccttccgatcatgtttttagttccatcaatcaagcaatggagacatgcttgtgcttcatacttggcagcatcgtgtttgggttttcactgggcagtactgtttaatttttatggactgaaaagactcagttttgtaaatattcgtcactgtgaccaattcctgtggtggtttatgtgatttgcagattgcagtggttagtgtatcttcccaattttcactcctttaacacttgtggttgtttgtgacgtgtgcagatttatcttttcatttcttcaatcaaggttttcatttcttaatctggagaggtgaactaccaaagaacagaacctaggtagaacatgaacttctccgtagatagaagtgtcgatactgtggataaattcccatcagccatcaccttacaggatggaatgcaagccaatatttcagtcgttcatctacggtttagctgtaatttgaactaaacagactactccgtcttagtcgttttagcacttttttatgtctattcaaatagatgataacaaatttagacttgtaaataaaacacatacatcaagcattactagttggttgctcgtgcgttgcgacgactcataataatatccgcataaactatccacaaaaaagatctaaaggttttttattaattgtctccgctcttcgcataatattttttataaacgtatggtaccataggcaacaaattagaaaccccatctctcgcctaccccacttccaaggtttcgtagagcaggaggggaagggaagatgcgggcatacatgtttgttgccagagaaggacacgacgaagatctggatatctggagacgacataggtagtatacctctagatacctataaggagagagcacgcaagcagggaaagaagctcagccagagcagctccaaacctagaggcacccgcaccaggcgtcagtccgagaagggcaagagaatgcgagtgtcttcccaacccttgatccgccgaagcgacacaccaccaccaacaacttcatagcatatgccgactgctgccattctacgtgccttggttgttcaatatttcagacctggattcctcatcgccaagataacctaagtgtggcaggcgccaccatgtcctcctcgacggcacacacagaaaagaccaggagcatgaccgactcgccccgtacccgcgtcgatgagcgtc

SEQ ID NO: 688 - protein, 591 aa, Zea mays
MCGILAVLGVAEVSLAKRSRIIELSRRLRHRGPDWSGLHCHEDCYLAHQRLAIIDPTSGDQPLYNEDKTVVVTVNGEIYNHEELKAKLKTHEFQTGSDCEVIAHLYEEYGEEFVDMLDGMFSFVLLDTRDKSFIAARDAIGICPLYMGWGLDGSVWFSSEMKALSDDCERFITFPPGHLYSSKTGGLRRWYNPPWFSETVPSTPYNALFLREMFEKAVIKRLMTDVPFGVLLSGGLDSSLVASVASRHLNETKVDRQWGNKLHTFCIGLKGSPDLKAAREVADYLSTVHHEFHFTVQEGIDALEEVIYHIETYDVTTIRASTPMFLMSRKIKSLGVKMVISGEGSDEIFGGYLYFHKAPNKKEFHEETCRKIKALHLYDCLRANKATSAWGVEARVPFLDKSFISVAMDIDPEWKMIKRDLGRIEKWVIRNAFDDDERPYLPKHILYRQKEQFSDGVGYSWIDGLKDHASQHVSDSMMMNAGFVYPENTPTTKEGYYYRMIFEKFFPKPAARSTVPGGPSVACSTAKAVEWDASWSKNLDPSGRAALGVHDAAYEDTAGKTPASADPVSDKGLRPAIGESLGTPVASATAV

SEQ ID NO: 689 - DNA, 3093 bp, Zea mays
tgggagctgggcatgcatctaacatgcacaggactctggtttttgagagatctcgtggtataatccactggtctccttgtttactgcacacatttgttttttaaaagtttatatatattattattttcgttctcgttgtcggctaatttatttttaaattaaaccttaaaaaataaaaaaggatggaggtagtactatggagtatggacggtgacgacgagtagtactcgcatcggaagcagtgaggcaggtactggaaccccatggcacatgcacaccaccgtctaaaaagcttcgagcggaggtagcagcaaacacatggtttttgtttcgcccccaaaaacaggttcccaatcccacccaccgcttctccttctccccgtccgttgctggtatggccaactttattgtggtgtggcggataaagaagatccatcctatcgctcgctgccgatgcggctgacgtctgcggtcgtcatctgcctaccgaaaactgggagcgggcggacggagcgccagcatgtgcagttccttccgcccccagatcgccatcgtgagaaaaatgcactttttaagcctgcttgttccttctcgttaacagtctcactgtcaccgtggctactctcccattagcttgtcaaactagcagcagtagtgccagtggttggtaacttgtttgctcttcttcctttttcgccccctcccaaatcttgagtggtattagcacacagatgcccaaataaaacagtacaaggagcagtataggcccacgcgcatggtgtcgcatgcgacgcccgtctcttttgtctccctccctggaatggataggttcataggtctcccctgaaaagtgcatgggctccaaaacaacgtccgcgccgcccgccgcttctcccctcccctccccgcgtccgccgattgtttgtgtggttggggtcccccgcccgatgcttggcggcgcaacggcgcctataaatccttggcctctcctctttctggcaacacaaaacacatccatcctccttgcaactccagtgctgctcactgccactgccagcagatcgagctgctccgtctcacaaaccctctagcttgctttgctgctccacctgcaagtctgcaaccgcgtacagagatgtcgacggtgagccgtgcgtccctcgaccagaagctcgccctcgccaagcgctgctcccgaggtacgtgcgattgtgcgaagcacactagctagcctgtttattacgcaggcagtacactgactaaactgactgatcgatgcttgtctgtgtgtcgcatgcatggtctgcagaggcgaccctcgccggagccaaggcggcagccgtggcgactatcgcctccgcgatccccaccgtgagtttcctttcacgtctctagcttaatttctcccgtagattaatcaggcgcatgctgcgcagccgtacgtacgtacgtacgcgtcgatcggtcgcgaaacagcccgtcgtcggccagtctctaataactgatcgtcgcttcttcagctggccagcgtgcggatgctgccatgggccaaggccaacatcaaccccaccggccaggcgctcatcgtctccacggtggctgggatggcctacttcatcgccgccgacaagaagatcctgtcgctggcgaggcgccactcgttcgagcaagcccctgaccacctcaagaacacctccttccagggcaccggccgtccccacccggctttcttcaggccgtgagacgtggccttcgtccagagctagctacctacctctttcagttcgatcgtcgtcagtgcaaagcaccaccaatgcctgaataaatttaactacgaggctagctgctgaacatcgatctgctactgctagtattactacggcgaggctgctgaacagcgctgtagagtagtattggtgctcagttcagaatgtataatgttacttctaccgattaaactgttaaaaaaccctagtacgcttatgtggtcaaataccacttatatctgtgagcagtgtcgcatctctatataaaggaatatgtatcttctcagaaagaggttagagacccaactctacatactgtttttttaatgtgttttctgagtgtgtggattgctagaaaagaaaacgtgcttctaccgacttttcgcgtctatactgctgacaggaggggaaatgagcaaatctgatgatccatgttaacattgatgatttgtgatagcgtggttctcagcgtaaccaaccttgtctgttattctcacgtagagagggagagagaaaaaacaataaagtagcactaccccaggagccagtgcgttttaaaaagggccgcacgcaccgttaccaaccatttgacacaagtgcaaaagcccatcacgcgtttttaaacgggccaaattctagttacgataggtttttttttctgtagcataaatcacctgtattgaaccgaaaacatcatacgccgccgcctgcctctcccgccggccgtgggctgccgcatcccggcctggtgccctccggcggccgcatccaaacccccccaccccctcgcgtagataagcctagtaatcagtctcggcggcgcgggacgctgtggcgggggagaccagtgcgagactgcgctgtcttgtccattggggggatttggggctgtgcgcgaggcagttaataatgcccgtcctctccccaagtcagagtccgctgccatggccgtcgccgtcgccgtcgacgtcccctcctgcatccagctcctccgctcctgcagcgcggtcgccggccggcagctccaccagctcctcctcaaatccggccacgtcccctcctcgctcccgcccactaactccgtcctcctcatgtacgcgcgcggctctccgctccactcccgcgacgcccgccgcctgttcgacgaaatgcccacgaagaactgcttctcctataactccatcatcaccgccctcttcaagtccggagaccaccgtgcggctctccgcgtgtttcgctccatgcctgacaggaacaccttctcctacaacgcggtgataactggcctcactggtgctggggatctcgacaccgcgagtgagttgct

SEQ ID NO: 690 - protein, 115 aa, Zea mays
MSTVSRASLDQKLALAKRCSREATLAGAKAAAVATIASAIPTLASVRMLPWAKANINPTGQALIVSTVAGMAYFIAADKKILSLARRHSFEQAPDHLKNTSFQGTGRPHPAFFRP

SEQ ID NO: 691 - DNA, 7117 bp, Zea mays
gctggctagctcgtcggcgacgggccggtgatgcgctcccgacgaatgcggtggaggtcgtaacgggcctggtgacctgcacgctgggcaagcgggcagcatcaagaaagcgctgatgagatgtgaggattgttgatcatttgatctgccggaggatgcgaactgtggtacatatacctggaacaaatatagttgcaaattctgtgcagttaaacatatacctggaacacgttgaatcgatcgtgtgacgactctaactgacgatgtacagccaccgtacccgtttcctgtacagatacggccgccgcatcgtcgtaggcacgtcgtcgttgtcgatctcccaatcatgtgtaccacttgcgcacggttggattggatcagtgttcaccaaaaaatttgtgccggcacgcggcacacaccacaacaacaaactgcatatcatggaggtcacctttgccaacacgtcacgctttgcccggctggtgcggtggtgcggatcagataaatgcatccgtagcttataaaaatggtgatagtgttttttcttcctgaaaatagaaatctagttttgtgataaacaaataatttttaatttaactatttatagacatagtttgtttttaagagaaaaagctaaaatgccataaaatttgagaattaagacagtactgcttatgataagcaaatttaaactcagaatatatttatataaaaaaatattgatatgagattgaccaagcgcttagcgcacacgagaatacgtacagaagtgtccttctgccacgccagtccacatctccacggccaccggcagacggcaccgaacaagggacacacgcgctcgtaggcagtaggcacgcacacgccgccacgtcgcagccacgagcccacgccacgaggccacgaccccaaaaacagccgtccacgtcgcttccccggtccggcgaccgcgcccgctgttttatacgcgacccggcggccgcacccggcttgcgcacgccgttcacgtcccccggcccccgctctcgtttcccccgcccgcaccaggcacgctcacgcgctgcgcaccggatggcccctgctaacgtgcgcgcggcgcaggcgcaggcccccagcgccgaccgcaggttaagtacgctagtggggcacctgctgccttcctccccacgaagagcagcagcagacacctccgccacctccaccctcgaatcgttccccaccatggcgtcgcagggatcctccgtcttcgccgcactcgagcaggccccggaggaccccatcctcggagtaagtccgtctccccagtcctttttagcttcctttcccacggtgatctggttgtcgctatcggtcgcgcggtttcgatgcgatcgcggcctcgtgggtttgctctggctgatcagtgttcgtttggtttctgggcaggtgaccgttgcctacaacaaggatcccagccccgtgaaggtcaacctcggggtcggcgcctaccggaccgaggtaagatgagtttggggatttgctatgaaccttctaattccccttctgtttttttattagttggattggagatggatttgacgctcctgttcctattctgatctctgcaggaagggaagcccctagtgctgaacgtggtcaggcgcgccgagcaaatgttgatcaataatccgtaagtgtcatgtgaaatccatatgacccgcttgatttcgtgatcgtgcctctgtggttattgaactttcaggcttaaagctcctgccctcagcccaagtggaaacggaaggggatttagatagttgctggatctaaaatctggataacacgcctcttaatttgactaatactttcattcgcatccataataattattgacttgtcctctgtaattgtaggtgacctttctgttcaatactagtttttaaataaattttcttctacgtttaggactagtcttttttttgcgactgtatctgctctgtcccactgccgtctaagattctcttctgtagtcgaccttcaattgctttccctcctttcttttttgtggtacctgaaaaattgaccttcgttttgtctgtggggggaatggtttgtcgtttgcaagcactgccatactccctctgtccaaattttcttaagtttgaattgatagaaaatattttcaaatgagtttattataaaactagattcgaaggttgatactaattatatatcataattattatatatatatatatatatatgtatgtatataattggtcatattatacattgattacgactgacttctgggaaagcgagagaagataaaaagggacgtatgaagtatgtctcgtgtgtgtacaagccactgatgcgaaaaaactgttggtgtggaagtttatgatacttgaagctgtattttagacacatttttcttcttatttctaggtcacgtgtcaaggagtacctaccaatcaccggtctggctgaattcaataagctgagcgctaagcttatctttggcgctgacaggtattctctgtttgactggtttacccattttcctcatttgtgggtcaactgttcctaatggtgatgttgtcaactgtgaattcttagtgttgaagtttcattacataaaaataagttccctagctactggttctggtttattcaggttttattacttcattagggagctgattttttttttgaatcgaatagccctgctattcaggagaatagggttgctaccgtgcagtgcctatcgggtactggttctttaagagtcggaggtgaatttcttgcaaggcactatcacgaggttaaacttttcttgctcctatctgttttgctgcttcctgattataatgcatgactgctaaatcatacaaatatattccagcgcactatctacatcccacaaccaacctggggaaatcacccaaaagtcttcaccctatctggcttgaacgttaggagctaccgctattatgatcctgcaacatgcagccttcacttcgaaggtatggatttcattttcatgctagatctattagatatgctataataatgtgagtatgctagtcaaattgacaactgtgttatatttttttatattcgttaatttttttatggctgtcattgaccaaattttgtgttgctttgcaggactcctggaagacctcggttctgctccttcaggttcaattgtactgctgcatgcctgtgctcacaaccctactggagtagatcctaccatcgaacagtgggaacagattaggcagctgatgagatcaaaatcactgcttccgttctttgacagtgcctatcaagtatgcagatgtgcagagcaaaagtgacttgacattgcaaaaaacacatctggatcctatacactcatcattcacatttttttgttaacctgacagggctttgcaagtggaagtcttgacaaagatgctcagtcagtgcgtatgtttgttgctgatggtggtgaacttctcatggctcagagctacgctaagaacatgggattgtatggagagcgtgttggcgctttgagcattgtaagataccttcactcttgttcttgttgatttcacttccgatcatcaggaaatcaaggttgttggcatcttcctctggtgttcagatatattcctatgtttaccatccaacttgtgagcttaatgctataggagcgattgatgtgtggaaaattctgccacttgtgttcaaatttgtattttatctccctacttgttacttgagatatgtcagttcatatagctcgtatctgtttctttatctgaaatcagaagtgcattgctatggatgggttgagttgtcaatcacctgtagtcactggtgactacaattttagccttttgccaggattgaattctttcgcatttgtagaatattatattaatgtagaaattgtttttaatgtacagtggacaaccatttacttccatcagttccagagatatttgactagttaaggatagtcatgactttatgccttatctgttaaatgatgatgttatttctcctacattatgcccttttgaacagtcttttaggctgcagagtgtcctattcatagtaactcttatgtttcaggtatgtaaaagtgccgatgtagctgttagggttgaaagtcaactcaaacttgtcatcaggcctatgtattcaaaccctcctcttcatggtgcctctatcgttgctaccatactcagggacaggtatcattcttgctattgcaatgccatattcagaggtgggtccaagagttatacaaagtggttacttcctgttgattgattctatttattaacttccagcgagatgttcaacgaatggactctggaactgaaggccatggctgataggatcattaacatgaggcaacaactatttaatgcgctgaaatccagaggtacttgtttctgtcaattgctatttttctacaaaatatgattaaatgttgtttgcaaagtaacttacccttttctcaattaccatttctttcatggtcttgtattgcaactcttggtgcaaatgtttttcttttgtcctggattaatgtagctgcttaaggcaagctatgtagctactgctgcatccaagatctcttggagtcttgggttatcagcaactattaaaataagagaactttctctttttaccttctcagttgatttatcaagaaattgcatctgaccttaaaatagttatcaatctgtgtgacttatttgggggagcactattaatctgtgcttggaatgtttctgttttttatctgaattgaaaggctataatgtcacattctttttgcaccagaaaagaaattaccattatcgaatctcaatgtattgttcctttcttttgtctttcgtttcgggtttcgggtcatagcacgatggcactcagtctcgttaataacgtgcaggaacccctggtgattggagccatatcattaagcaaattgggatgtttactttcactgggctgaatagcgaacaagtcgcattcatgaggcaggaataccacatttatatgacatctgatgggtaatttgtctattcaacttttataagtatattgtgtttcctgtatttttgtagtctagttgctacttaacagtggctactttggacttcttattaatcttatttgcctttcccccttaagggctagtttgggagtccaaaaactggaggggaattgtttggacttcttattaatcttattttagcccctccaatcccctccggttttgtggctcccaaactagccgtaagttggggtataggcttaggtacttgtcttaatatgttactccctctgtttttaaatatatgacatttagaaaagctaataggacacgctacttagttataaaaatgaatcattagcttgtcctacacttcgtagtacttttaagatcatatagcattgaacaaactggatctgcactatttgacattgatctaaaacgaggtttcattttctcactaccacatggcctttccacatgagttggagtggtttagtgtggaatgtaaactaagggctactttgtcaactcaactctattttcccaagggttttccattttctaagggaaaatgaacgaatttctcttggggaaatgaaaatcccttgtaaaaatggggtttccaaactagccctaaatttcatattaaaccactctaactctaacagtacacacaagaataaggccaacacatgggtctccaaacaagccctataatggaagtcccaactgtcatagctatattgacaatgtatatattctttttgcaggaggatcagcatggccggtttgagcatgaggactgtgccccatcttgcagatgccatacacgctgcagttactcaactgaaatgaggatagtatcgcagctttcgtgaataaaacctgaatcacccacaacaatgttctaagtactcagccagtggtatttactggttgacctactgtagtttgcgtcggaatagatatgtttttttactcttcgtggggcagttttgtactggtggattcataaggactctgattatggtgcgttcggaacttataataataagcacatgaaattttgcttcaggtgcagtgatgctgtctcattaagttattagttattaggttgctgtcttattaagttatcaggtcgcagctgggttgaagcggagcacctgtcttgatttatctcttctcttttctagagagcttctgtcattcgtgtgcccttttatatcattttgctctatcaatgattatcctacaatctgcagtagttttgattccgttttgttctttgcctgctgtactggctcagaagtacggtaatgctcgcaagctttgcggttgttgatttagggactgaaaggatctgtttagaaaggtgtcgatttggagactcaaaaggatcaagaccttccaaggaaggtgaattgagtttctctaaattttcttgtatgaattaaaaagttttgtatcataatttttaattctatactagcatgataattctatactagtgtgacagttcttagcgtgacaatcctgagaatataaatattttaattgaattgttcaaaataaatgttgaattacttaaacataaatgtgtatagtaaagattagaagacatcgattttttatggaggtcttgagagtccaactattctttattggagatctttttagtccacctttattggagatctttttagtccacacgaagatcaagtgctctctctgacggcacagttaattggtcacaaccattgtataaacccgagtgagttcacttataagctatttgaatgatcatcacactcctaatcaccatctatgtctatgtgaagtataagttctctgaatgatcatcacacttcaaatcaccatctaaatgtctatgtgaagttgattaccaagagtaccaaacactaaattacttaggccaaatcaaacctaatgagtgtgatggttgtgtaaatcactctaattgccactaataagctcgctaattatgtcattattagctctcaagtcccctcactagcaaaggatcttccacactctcaagtggcgtttcatgtg

SEQ ID NO: 692 - protein, 459 aa, Zea mays
MAPANVRAAQAQAPSADRRLSTLVGHLLPSSPRRAAADTSATSTLESFPTMASQGSSVFAALEQAPEDPILGVTVAYNKDPSPVKVNLGVGAYRTEEGKPLVLNVVRRAEQMLINNPSRVKEYLPITGLAEFNKLSAKLIFGADSPAIQENRVATVQCLSGTGSLRVGGEFLARHYHERTIYIPQPTWGNHPKVFTLSGLNVRSYRYYDPATCSLHFEGLLEDLGSAPSGSIVLLHACAHNPTGVDPTIEQWEQIRQLMRSKSLLPFFDSAYQGFASGSLDKDAQSVRMFVADGGELLMAQSYAKNMGLYGERVGALSIVCKSADVAVRVESQLKLVIRPMYSNPPLHGASIVATILRDSEMFNEWTLELKAMADRIINMRQQLFNALKSRGTPGDWSHIIKQIGMFTFTGLNSEQVAFMRQEYHIYMTSDGRISMAGLSMRTVPHLADAIHAAVTQLK

SEQ ID NO: 693 - DNA, 14054 bp, Zea mays
gatatttcacaaattttgtttcaaaattatgaatttgatttttttataaaaatggagaaaaagttctattaaaaactaaagggtactaggagtccaaaaatacatttgttgttcaaaaatttatcttttggcgaattaaacaaattataaacatatcttatcgaatttttatttttcaaaggtaatcaaaattttcagtggtaaataaccgaaaactgctcggttttaccggttttccgacatttttttaccgaatctcttttttcaagtttaaataaagaaccgaccggtaattacgaaattcgtcgaaattcgagcgattcatgttttcggagatcatcgaaaaagttgctcagaaatgagatgataagccttgctcgagccccatcccgcccaccggtagcacggtccctggtttttgagattgtatgctagattatgtagatatgtttctcataaaaatattcaaataaatgctatctttttacatacagatagagtctggtttgctaacacgtgtccttttttatacccatcaaatgcaccatataggcaagtgtacaatgggccagactcagggttcacaatttcctttcgaagattcgaattttatttttgtgattaaaatttgacttttgtatttttatattttgaatcaaaatccagttaaaaccggaccgaaattcgtttatcggtgagtagcgaaaacgagaaaaatggcaaaattcggtgttaccgaaaccagaaagtaaaccgtggacggaccccactgtagatccttattcaaggttagtttgataccttcaatcctctgtggttttcttactcctaaactaacctaccacatttaaaatgagtaacaaataaataaagaaaaacaaaaaggtaataacatttgtgagaagagctggagagcgaaaatataggcagtggggcccgtctgcgtgcgtggggacgcgacgcgagacaaggagagcgggtctggtgagtggtgactggtgggttggcaggcaggcgcagcgagggcgagctcaccaccacggcacgtcggcaccaccaccctccctctataaatgcagggacaccgaaataccgaatgctccccaacgccctatactaatccggaggaggggtcaaggaaggcgagcgacgctcccacaccaatccacaacaccgccgcgccgcccgccgccgctggggacgagcgtggggcgagcaaccaaatctaagacaccgatccccgacgcgcaggccgcgaagctagcggcggagaaaagatcggagccacaacgcggtcgtgagcccgcagccaccggttccgcgaggctagacggagacagaggtatccgctccagcacccctgcttgccaggacccgcgagacgctaaaaaaagttgacgggattggcaacttggcggtttggtttggctgcagcgtgcgtgtgtggttggtggcatgcgcggccgtctcgttgtttttatcatttcgacccgttgatgttttattctgcgtccgtccgtgcgctcctccgtgaatctggcgtgtcgcggcggcggaatctgcgccgccgtgcgggggttggtagatctgttcatccctgcgcgtgtttccgccgctgaggtgtttgtttcgtacttctttttttgggagtgctctgttacactgcagagtgggtcgcacgatcttttctggatgtttatggtgttgacatgtgggcgactgagcgtagggaaggggacagggacagctttgagttttctgcttgtatttccggtgctttttaaataccatttcccggatgtctggttcctttcccccccccccccccccccccccccccccccccccccccccccccccgcatggtgttgtagatcgatgaatcgctaagcgaacaccatctgatgctcgtcgtcgtttgattgttgcatggcagatagcgaggcttgctgttcagccatgtcgacggcgcaagggacagcgttgaagtcggcgccgataggcgcaggtcatcgggcccggcgcggccgccccgtggtgccgccgtaccgttctggctggcaagcatacggcggcgtttccctcgagggcagcgggttcctcggcggcctgcagcgcaccgaggagcgcgtcgctacgctggcgccccgcgcggcggcgcgcgacgcggaggtggtgaggccgctctcgaagctcccgaacagcagcattgggctctatgatccctcgttcgagcgtgacgcgtgcggcgttgggtttgtcgctgagctttctggcgattacaaacgcgagactgtaagtttcatcgattccttgaaagaggcgatgccacatgtcctgtagttatactatttcgatttatcatgttcgggatgccaattttgctatcctttttaccgtaggttaatgatgctattgaaatgcttgagagaatggcgcaccgtggtgcctgtggctgcgaaaagaacacaggagacggtgccggcattatggtcgctctaccacatgacttcttcaaagaggtgagtttctttgcaacaaaaagaaatagaagaaaagaaagcaaagctgttcttttcgacagtcattcaatgctttggtgttcccacaggtcacaaaggatgctgggtttgagctacccccgccaggcgactatgctgttggaatgtttttcatgccaaccgatgaaaagcgtcgcgagaagggcaaagctgagtttaagaaggttggtgatagcctatgagcaatgcaggatctgcatgttaagctcacttctcttattaataatcttgtccttgtaggtcgcggaatcactgggacatgtaatactcgggtggcgtcctgttcctactgacaactcagacttgggtgaatctgcactcgagactgagccagtcattgagcaggttttcgttaccaagagttcaagatcagaggctgagtttgagcaacaggtaattctataccactagatgtaattgcacatcagcatatttgatggatttggctttaacgttttttgatgaattgctgcagctatatatccttaggagactctcaatcatctctgtccgagcctctctgaacattaagcgtggaggagagagggatttctacatgtgctctctatcttcaaggttcttccctttcctcacctgaaaagtttttgtttatgctttggtttcattatgtttcagggttgaaaaggggcagagagtttccactaagcacggttttagaacagaattttggcaataattttgattttctataagggaatatcaaattattgccttcaatttggtcttaacagttgtaaatatgtagccaaatgtcattttggtcggcttatgtttgtatgaataattcttattcaaagttgtatttctttatattacaggactattgtttacaagggccagcttaaaccgtgccagcttaaggggtactactatgctgacctaggtcaagaaaacttcatgagttatatggctctggtaaatacgaaactttagcagtattacacaaaaattgtcatgatcatagtcaacggatgcgaaccaataatagcatggctgttgtaagaagatatgctcccatgcaggcatcatactttgaactgtcttatcatcactgctctactcatatgctattttagtcctggttcttgacgccttaaagtaaactattagaaatctctattagttgatacccgataaccatgttgcagagtcaagctgcagttctgctatggccgactgctatgcccgactcatcaggatgtgacctccgattaggtggtgggaaggaaatgtgtttggtttgaggtagcttagggctcccaactgttttgatgaaattctgtgctactgatgctttctttttggtagtgcaagtgcttcattctgatgttctattcagcatcttaaagctgcaaactatgtctgtaatatgatttctaaaatccatatattaaaacaggttcactcaaggttctccacaaacacctttcccagctgggaccgtgcgcaaccaatgcgtgttttaggtcataatggagagatcaatacccttagaggaaacaagaattggtaatctcgctaaactatagtttcatagtttatatttttgtgtggatacggtcatctccatattcttatgctgtttggattttatggttcttagcttgtctttaagtaatctggatttatgacaggatgacagcacgtgagggtctcttagaggcggagaagcttggattatcaaaggagcagcttgcaagaattctgccaattgttgatgctacctcttctgattctggtatggatgcacagttacagttggcaaatgaaaattgcctatctatcttttggaaacttattacctggaaaaaatgttaactgtaggcgcattcgataatgttcttgagcttcttgtccgtggtgggcgaagcctgctagaagccgtgatgatgatgatccctgaggcatggcagaacgatggaaacatggatcctgagaagaaagctctctacgagttcttgtcagcacttatggagccttgggatggacctgctctaatatcttgtatatatattctatccacttttcttttctaatcattcttctcctgattgttacttgatctactcaatcctaacttgtctttcgcctacagttactgatggtcgttaccttggagctaccctggaccgtaacggtttgaggcctggtcggttttatgtgacgcacagtgggcgtgtgatcatgggtagtgaggtcggtgttgttgatgttcctcctgaagacgtgctgagaaaaggcaggttaaaccctggaatgatgctattggttgattttgagaatcacactgtagtggatgatgaagctctgaaagcacaatactctaaagctcacccgtatggggaatggctcaagagacaaaagatatatctcaaggatattgtagaatcagtaccagaaaccgatagggttgctccaagcatttctagctcacttcctgtaagtccttaccgtgcaccaatattactagtgacaacttgggcaaaacataagtactgtagcgcttatgactcttataatttggtgcaggcaaagaatgagaacaaggaccatgttggtatcaatgggattttgaccccactgaaggcttttgggtaagcaagggatttattctgttctgttgccgtttcaagttttgctgatagttaactgatgtattctaggtacacggtggaagccctggacatgttgctactgccaatggctaaggatggagtggaagctctcggttccatgggaaatgatacaccacttgcggtgatgtcaaacagggagaagttgacttttgagtacttcaagcagatgtttgcacaagttacaaaccctccgattgaccctattagagagaaaattgttacatctatggagtgtatgattggccccgaaggcgacttgttggaaacaactgaaaaacaatgcaaccgtctttcacttaaaggtcccttggtttctattgatgaaatggaggctattaaaaagatgaattatcgaggttggcgaagcaaagtgcttgacataacatacccaaaaaagtctgggaggaagggcttggaagaaactttgaacagaatgtgtgctgaagctcgtgaagccatacgcgagggatatactattttggttctctcagatagaggttagaattttatctacagtagtatatttttattccatattttatctagcaggcaaaaactgtttgtaatcaagcttcctgtcaattgccgtgcagtcaaactatcaaaaattatgagaaattctcaaaatttatagatgtactttattatttactctatcaatatatcaaaattaaaattcaagttttaattcatcctatgttaagagataaaaaagagaaaattctatctaatatgaaggattaaaaaatatagttttttatctttttatatcttttaacatagtataaattagaatatattggtaaagtaaataatgaagtatatctgtaaattttttgacaattttttttgtgatgtttggtagtttgattgcatgacgattgcacgggaagcttgattgcataacagtttttgccttttatatgatatatgattataccaatcacccaacagttaattgaatttccctacatatgagttataaatgcattctacaattttgttggtctgttgctctattcatttgcaggatgtgccataactcacttgttccttttcgtttagcttgagaatagctctttacacaattcaattcctttgacagtccatcaaagtttcacacatggagatttgacttaattttgtttgcctaactttgttatgcaggattttcctcagaccgtgttgctgccagttctctcttagcagtgggagcagtgcatcagcaccttgttgcaaatcttgagaggacacgcataggattgttggttgagtcagctgaacctcgtgaagtgcatcatttctgcaccctgcttggatttggtgctgatgctatatgcccttatttggctattgaagcaatttggtgcttgcagaatgatgggaagattcctcctaatggtgatggacaacccaactcaaaggaagagctggtgaagaagtatttctatgcttctaactatggaatgatgaaagttcttgcgaagatgggaatatccacccttgcatcctacaaaggtgcacagatttttgaagctcttggtctttcttccgaagtgattggcaagtgtttcgaaggcacacctagcaggattgagggtgcaacatttgaaatgcttgcacgagatgcacttcgtcttcatgagttagctttcccatcaagaacccctccagctggcagtgcagatgcaaaggcccttcccaacccaggggattaccactggaggaaaaatggtgaagttcatctcaacgacccacttgcaatgggaaaactacaagaagcagctagagtcaacagccgggcagcatacaaggaatattcgaaacgaattcaggagctcaacaaggcgtgcaatttacgtggcatgctgaaatttaaagatatttctgacaagatatctttggatgatgttgaacctgcaagtgagatagtgaaacgcttttgtactggagcaatgagttatggttctatttcattagaagcacatactgcccttgctattgccatgaacaaacttggaggaaaatctaatacaggtatggttctcatccatacgtgatatttctctgttatagatgtggaggaattattgttcttttggcacattagctccatgaaaaaccatctgaacaaatgtaggatgtatggaccattttctagtttttgtaagggtgatgtgctgttcttttcctgaaacatgaacaacagctgcctacgttttattatgtgagcctgtcctctgcactaacattttagacaatcacgttttattatgtgagcattgcttctgaaaacatatcatactgttttgtttgttatagtttattgcaagatatttttttgcttttataatttttaaacgctagtgctaactgatgaggacatctgctataaatttctttggtttaatagaagtggttaaatactgctgtatgcattgttcctttttgattataaaccccttcaacttgttcttatattgtagttcaggaacatgagcagacagtgtgttttctagatcttaatattaaatatacttattcccaagtctaagatttatgtgaccaaatacacttgctttaatatatctgtgaaggtgagggaggggaacagccctctcggatggaaccacttcctgatggctcaatgaacccaagacgaagtgcgattaagcaagttgctagtggacggtttggagtttccagctattacctgactaatgcagatgagctgcagataaaaatggcccaggtactttgtcaacattgtgcactatgcagccgttaacatgaattgcatctttttgaaagaacatgggtcttccatatttcattttggatttactgttttttaccttaaatttctatagggtgccaagcctggtgaaggtggtgagcttccaggccacaaggttattggtgacattgctgtcacaagacattccacagctggtgtaggactgatcagtccacctccgcatcatgatatttattcgattgaggatcttgcacagcttatacatgatcttaaggtatgaattgtaaatagagtaatgctgctttctatacccacaagatccatggctcattgattgttgctgttggctcaatttaattttttacactcgtcttaacaacctctgaaggcctctcttattgatcttaatattcgcggatcacttgctgtgaggcaactcttgctactttttactggtgaacttgcatgtatgtttgcgaatctccaacttgcaaatgctgttcagtgataatgatattcttgcctgtgcagaattcaaatcctggagcccgtatcagtgtcaaactagtttctgaggctggtgtgggagttgttgctagtggtgttgtaaaaggacatgcagaccatgttcttatatctggccatgatggtggcacgggagcttcaagatggacaggtatcaagaacgctggacttccatgggaacttgggttggctgagacacatcaaactctagtagcaaatgggcttcgtggtcgagctgttctgcaaacagatggacagttgaagactggtagagatgttgctgttgcttgcttgcttggtgcagaggaatttggttttagcactgcaccactgatcacactcggttgtattatgatgcgaaaatgccacatgaacacttgtcctgttggtatagctactcaagacccagtgcttcgagaaaagtttgctggagaaccagagcatgtcattaacttttttttcatgcttgctgaggagctaagagaaatcatggcaaaccttgggttccgcaccattactgaaatggttggacgttctgatatgcttgaggttgatccagaagtagtgaagactaatgagaaacttgagaacattgatctctcactaatcttgaaaccagcttcagagattcgtccaggtgttgctcagtactgtgttgagaagcaagaccatggcctagacatggcattagataacaaactaatagatctgtcaagaactgctattgaaaagcaagttcgtgttttcatcgagactccaattcagaacacgaaccgagcagttggaactatgctcagtcatgaagtcacaaaacgttatcacatcaatggattgcctgctggtacaattcatgtgaagtttactggaagtgctggtcaaagctttggtgcttttctttgtcctggagtcactcttgaactggaaggagacagcaatgattatcttggtaagggattatctggtgggaaaattgttgtgtacccaccaaggaacagttcatttagtccagaggacaatattgtcattggtaatgtggctttatatggtgctaccatgggagaggcatatttcaatggtatggcagcagaaaggttttgtgtccgcaactcaggtgctcaagcagtggttgaaggaattggagatcatggatgtgagtacatgactggaggcactgtggttatccttgggaaaactgggcggaactttgctgctggcatgagtggaggcattgcctatgtttatgatgttgatgggaaattcagtgctcgctgcaacaatgagttagttgatctatatcatgtggaggaagaggatgacatcatcacattgaaaatgatgattgagcaacatcgtcgcaacactgagagtgttttggctagagacatactctccgattttgataatcttcttccaaaatttgtaaaagtatatccaagggactataagagggttttagaaaacatgaagttggaaaagagtgttgctaatcatgcaaaggagcctaagatggtaaatggaatatctgtgacgactaaggtgagatacattttcaagtgccaactttgtttcatttttcatatcacgagtttctacttagctatcctaaactattaattcatctacctaaacatttctagtttagttatcatttcctattcattcaatagggaattaaatctttgcacaaaaactttattcgtcagaaacagctaataatataattccgattcttggaagctttcattgactacttgtatcaactttcatgtacagaaagtacaacctgatcagtcagcaagccggccaacacgtgttgccaatgccaaaaagtaccgaggttttattacatatgagcgagagagtatttcttacagagatccaaaagagcgtgttaaagattggaaggaagttgcaatcgaatcaacacctggtccactattaaatacacaatctgctcgttgcatggactgtggtactcctttctgtcatcaggtgatatttctattcttgctatatatattcttaaattctctttccatcatggttaagatggatatattttatttattcagatgctgaattgaagttgtttctctagagtacttctgtaaaagaaacatgcgtttgtttcttttcttttctgctgttgataagattttggaactctctttttataacatttttattatactttcacaggaaagctcaggtgctggctgtcctcttggaaataagatcccagaattcaatgaattagttcaccagaacagatggcgcgaagcattggatcgactacttgagacaaacaacttccctgaatttactggacgagtatgccctgctccttgtgaggggtcatgtgttcttgggattattgagaatccggtgtctatcaaaagtatagaatgtgcaatcatagacaaaggtttcgaagagggatggatgattccacgacctccacttcaaagaacagggtgtgtgttttaaagttataatcatttagttttctccgtgtttggagtttaatttcgttactaggtagtatctcagttatgctcattagcagtgaaatgttccttttacagaaggaaggtggccattgttggcagtggaccagctggtttggctgctgcggatcaactaaacaaaatggggcattttgtaactgtgttcgaacgtgcagaccgaattggaggtttaatgatgtacggcgttccaaacatgaagactgacaagattggcattgtccagcgccgtgttaacctaatggcagaagagggtgtcacatttgtggtgaatgccaatgttggtagtgatcctctgtactcaattgaacgtctacgttctgagaatgatgcagttattttggcttgcggagcaacaaaaccaaggtaacaaactaaggttccagataaatttttgaattttgattgatagtagcttctaaatatatctgtgtgtttgtttgtaagatacatatggtatataatttttaagtacaacaaaaatacacacgatgcaacatatacttcaaatagtcgtgctctattttgacctatggtcatgtccttaacagagatctcaccatccctggacgcgagctatctggagttcattttgcaatggaatttctccatgcaaataccaaaagtttactcgacagcaacctggaggatggtaaatatatatccgcccgcgggaaaaaggtggtggttattggtggaggtgatacaggaacagattgcattggcacatctattaggcatggttgcaccagccttgtaaatcttgaactcctgacaaaaccaccaagcaatagagctgctgataacccatggccccaggtatctgtctctctttgcagtcatttatcactttctttagggtactgtatttatgtgctgtttggttcacatatttgtaacgtgaacggtaaccgataacgttaaatcatgattgttcaagtccaaccgtaatgagatatcacactagaaattaataccgtcctattcgaacttgttaccgctggtagtcaagtgtgaatcattatcgttgtcatttatatatgttacatttcgtgaaccaaacgacaccttagccttagattgctgagtgcaggaatatatcgttgcttgtgcatcttttccagcttggagttgttatttgcttatttctcctttttttgcttttagtggccaagaattttccgtgttgactatgggcatcaagaagctgctaccaagtttggaaaggatccaagaacttatgaagtcttgacaaagcgttttattggcgatgaaaatggcaaggtgaaggctcttgagttagtgcgtgtgaagtgggagaaagtagatggaagatttcaactcaaggagatccaaggatcagaagagattattgaagctgatctcgtcctcctagctatgggattcttgggtcctgaagcggtcagtacccttcaaggctatttattataaaagcccctaagtaccactgttctagtctagtgcctaacgtaccatttatgagaaatgtctgccaactaatagccttttcttcctgcagtctatcgctgagaaactgggtttggagaaggacaacagatcaaacttcaaagcgcagtttggagacttcgctaccagtgttgatggtgtgttcgcagccggggactgcaggcgtggacaatcactggtggtatgggccatcacggaggggcggcaggctgctgcagcggtagacaagtacatatcaaggcatgatcagaatgtcgcaggcgacatcactccctttggggcagggctcgttcagccggttggagcataaaaaaaacatagaccgaggcatgttttaggttctcgtcagtggttcctcacagcaaattttgttcttgtatattttgacgatagataaacagttgaaagttttggtgtctattgtttctttttcttctccggttattatgttttgcgtgtctgcatgtggttttctagtccaaaatgtacagttttccttttattaaatagatgtaaatttggtgggtgatatggcgatcattttgtgtgtatatgaaagcgaaattgagccaccaatctagttgagttggttaggtagttttagtagcacttgttaggtaggtcatgagttcgaattcgaatttaaagatacggttaaaaatgtcactcgttagatctagcctacagaggacggacagttgcacgagttttttttagctagttagttatttctacgttactatggtttctatattatatatatacctgtacgttgcaatgagaagataaaataccacgataactcatgtacaaatgtgttataatattataggaaaaggtttcataatttatttgtgatcctacccatacattaatatacaaaacactaattattatatatttttgttagtatcactaaaagtagatgtttacataccttaaaagatataggtgtatattcgtctgttgctatgaaatcaatatgataagatacattgatatgcaaaaatactaattattattctatacttttgttagcatcactaaaaatagatgttttcatatcttaaaagatatagtaaggtacatgccagagtaattcactttttaaggaatatactctgacatcatgaacttagaaaacttgctagcagcaatccaccgcctactgtttgtctctctagaagaggtagccagctcctcttccttcaaatacatggaatgcttggtgtgatttgagtacacggaatgacaatttctacaatcagaagctgctaactgcatacaagcaaaacaaaaggaataattccattccacattgaatcagagattagaagttggagcacaacttgtttgtcagttttttgccgaagctcgacgaaaattacaaacaggaaatggatagagcaagaaaaggagtgctccaaattaatgacatctaagtaaaaggatgacactcaaatatggagttacaagtagccaaatttaggtatgacactcaaatctggaacaacccaaactgtagttctttagactcctg

SEQ ID NO: 694 - protein, 2163 aa, Zea mays
MSTAQGTALKSAPIGAGHRARRGRPVVPPYRSGWQAYGGVSLEGSGFLGGLQRTEERVATLAPRAAARDAEVVRPLSKLPNSSIGLYDPSFERDACGVGFVAELSGDYKRETVNDAIEMLERMAHRGACGCEKNTGDGAGIMVALPHDFFKEVTKDAGFELPPPGDYAVGMFFMPTDEKRREKGKAEFKKVAESLGHVILGWRPVPTDNSDLGESALETEPVIEQVFVTKSSRSEAEFEQQLYILRRLSIISVRASLNIKRGGERDFYMCSLSSRTIVYKGQLKPCQLKGYYYADLGQENFMSYMALVHSRFSTNTFPSWDRAQPMRVLGHNGEINTLRGNKNWMTAREGLLEAEKLGLSKEQLARILPIVDATSSDSGAFDNVLELLVRGGRSLLEAVMMMIPEAWQNDGNMDPEKKALYEFLSALMEPWDGPALISFTDGRYLGATLDRNGLRPGRFYVTHSGRVIMGSEVGVVDVPPEDVLRKGRLNPGMMLLVDFENHTVVDDEALKAQYSKAHPYGEWLKRQKIYLKDIVESVPETDRVAPSISSSLPAKNENKDHVGINGILTPLKAFGYTVEALDMLLLPMAKDGVEALGSMGNDTPLAVMSNREKLTFEYFKQMFAQVTNPPIDPIREKIVTSMECMIGPEGDLLETTEKQCNRLSLKGPLVSIDEMEAIKKMNYRGWRSKVLDITYPKKSGRKGLEETLNRMCAEAREAIREGYTILVLSDRGFSSDRVAASSLLAVGAVHQHLVANLERTRIGLLVESAEPREVHHFCTLLGFGADAICPYLAIEAIWCLQNDGKIPPNGDGQPNSKEELVKKYFYASNYGMMKVLAKMGISTLASYKGAQIFEALGLSSEVIGKCFEGTPSRIEGATFEMLARDALRLHELAFPSRTPPAGSADAKALPNPGDYHWRKNGEVHLNDPLAMGKLQEAARVNSRAAYKEYSKRIQELNKACNLRGMLKFKDISDKISLDDVEPASEIVKRFCTGAMSYGSISLEAHTALAIAMNKLGGKSNTGEGGEQPSRMEPLPDGSMNPRRSAIKQVASGRFGVSSYYLTNADELQIKMAQGAKPGEGGELPGHKVIGDIAVTRHSTAGVGLISPPPHHDIYSIEDLAQLIHDLKNSNPGARISVKLVSEAGVGVVASGVVKGHADHVLISGHDGGTGASRWTGIKNAGLPWELGLAETHQTLVANGLRGRAVLQTDGQLKTGRDVAVACLLGAEEFGFSTAPLITLGCIMMRKCHMNTCPVGIATQDPVLREKFAGEPEHVINFFFMLAEELREIMANLGFRTITEMVGRSDMLEVDPEVVKTNEKLENIDLSLILKPASEIRPGVAQYCVEKQDHGLDMALDNKLIDLSRTAIEKQVRVFIETPIQNTNRAVGTMLSHEVTKRYHINGLPAGTIHVKFTGSAGQSFGAFLCPGVTLELEGDSNDYLGKGLSGGKIVVYPPRNSSFSPEDNIVIGNVALYGATMGEAYFNGMAAERFCVRNSGAQAVVEGIGDHGCEYMTGGTVVILGKTGRNFAAGMSGGIAYVYDVDGKFSARCNNELVDLYHVEEEDDIITLKMMIEQHRRNTESVLARDILSDFDNLLPKFVKVYPRDYKRVLENMKLEKSVANHAKEPKMVNGISVTTKKVQPDQSASRPTRVANAKKYRGFITYERESISYRDPKERVKDWKEVAIESTPGPLLNTQSARCMDCGTPFCHQESSGAGCPLGNKIPEFNELVHQNRWREALDRLLETNNFPEFTGRVCPAPCEGSCVLGIIENPVSIKSIECAIIDKGFEEGWMIPRPPLQRTGRKVAIVGSGPAGLAAADQLNKMGHFVTVFERADRIGGLMMYGVPNMKTDKIGIVQRRVNLMAEEGVTFVVNANVGSDPLYSIERLRSENDAVILACGATKPRDLTIPGRELSGVHFAMEFLHANTKSLLDSNLEDGKYISARGKKVVVIGGGDTGTDCIGTSIRHGCTSLVNLELLTKPPSNRAADNPWPQWPRIFRVDYGHQEAATKFGKDPRTYEVLTKRFIGDENGKVKALELVRVKWEKVDGRFQLKEIQGSEEIIEADLVLLAMGFLGPEASIAEKLGLEKDNRSNFKAQFGDFATSVDGVFAAGDCRRGQSLVVWAITEGRQAAAAVDKYISRHDQNVAGDITPFGAGLVQPVGA

SEQ ID NO: 695 - DNA, 9268 bp, Zea mays
cctataaaaatgccctataatttgaaaatgagtatattttatagaatttagggcaccaacaaaacaccccgctccaacagtaaagccccaaatctagattatagggcagcccactacggtgtagtatatttgagtcacttgagagggtgccctatagttttttgacaaaattttatgaaatggagcactgttggagtagtttttcctgtgtagagccctatatttcaatttgaggcactagtttgaggcattgttggagatgctcttacaaatacacggaacatatttgggttcagcaacagggacggacggacggcgcgccgtgttctacagacttgccgtcgctgcttctgcatctgttcgaaaaccgtaacccccgtgcaccgctggtcagtagtcgtcgtttcgtttcgtttcgtttcgtcgcggcgatcttcgaaccgatgaagcgtggcacttggctggttggtggtggtacgccgggccagaaggtgacctgcctcgatccgaataccatgcatcgatctgtgcacgtgcctgttctcttcctactccgattaccgatagtccgggccgggaaaaagagcgcgaagccagatctgaccactaggggtctgtttggttggtttctctcgccaacctggctgtgtgagccaggatcactggagcctggctctgaagatacgaccaatctgctcgtatctggtgagcctggcccaaggtgctttaaggatcgtgcgagtctggattcaaatctacatgcagacaaccaaacacagagctcgcacgcgcatagcttggctcatagcaaccaaacagcagctacccgcatcccgcgacgcaagcacgcgcagatgcaggcaaccaaacagaccccaggtgatccaggtcgtcgaatgttccacgcgaaccgcagccgcgagtgccgtctccggctccgccacaggtagagctcagagcagaaaatgctccagccacctgtctctcttcttcctccttcctgccctgcacgcggctataagtacccaccgccatctcactttgcccagcagcacggcagtagctgcgccattgcacgcctccggccggcggctgcttgtcttgctgcttctgccgcacatccgtgatccgtacgtcgtcacctcaccactcacgcacaagcacaaagagcgttaatttcttgctggagattctattctatttctatggcgtgtccctgatcgaatcctaaatcctaaacctctgtggtgcactgcagggcagaaggtgcttcgttcgttgcaggcctggcgccacgccgtaccgtgcaagcgcgtttgctgatgttcatctaattactgtataataatatctccgggcgaaagagctagcaatcgtcggcgggggaggaggggctcgattgctgctcaaggtgagttgtaattccttggctctggatttccctatctgttggctgttcatggatcatccaatggatggatggcgctccctgttctctacacctgcgtgctcttcttccctcgcctcgccggggtcttgtgtcagttactgtatctccctgttgattttaaaatctaagaagcaacaacaaaagatgattcaaaaaaatattcaaatttgaaggaccacaatgcgtgtgctactgctagctatgctaccattagagcatgccttcactgcattcttcttcttttgttacgagtgcttaatctcatggctcgctcccttaattcttgctaccattagagcatcttcaatactttctaaaaaaaaccacttgacaaactaatgaaatcagttggtaaactaataagtttcacgagtgactaaaaaaaagataggagctagcttctagtcctagataatgctcttatgagctttccttgtccagttgtcccaactcccaacgaacaaaaaaaaaaaggtaagaaaacacatttggcctttcttcttttttcttttcaactcaaaacgatcgctcagttacaaaaaaaaaagagagcttgcaattgcgagcgagataccaccgttacagggaaaaaaaagacaagttgttcaagttctctactagcttcctagcgcttccgtgtcgttctagatgagcttctctagcaaaggacaataatttggttgccacgtcagatgtcgactcagtgtcatttgctaccagctggcttatcaacttgggagattattgctcgcacctggacccggtgtccagtcaattattaatgatgttgatccatcttcgtatttttatcttggcaagaaactgttagtattaagttactgtcacctttggaagctgaatctcccctcgaagatatcagtatgggcatatagccatccgttcttatacacagctatttacgtctattttacaattttatatcttcgtcttcctcttttacacctacattcgaaccatctatttagagctttcaatgtgcaattcgtctttggtcattgtcaacatgaaccgtccagtgataatgctttgatgctgactaagaagtacggtctccgttcttaaatatttattgtctaatatttatttttaaaataaaacatgataaataaaaaagaacggagtgagtagaatacattgtgagctgttgttggtttgttgcacattctttacttgtttttttttacgaacatttgttgcaagcatcagcaaagccgtataaacttgtgcagctctagatagcgatttttttaaacaaaaccttaatattagattttggagcattgatttagaaagctgagcaactccaatgggagaggtgtttattttctcgtccatccacatccgccgttggcccgttgtttcttttctacccgcgcctgtggggcccaaccgtccggtcaaccgaccagcgtttcctgttccaccgtacgtcgtcgttctcgttcggtcgttttcgttcccctacctccagtccagtcccaggtccgagccggaccttgatcgccgccgtgcctcggcgcaaggaatggggccttcggtcttacccttgcacgcgccgccggcatcaggagacgtctctgtgtgcttcgccgtgccttcagccgtagccggcgccgcatcagcgtgctccagagaggaccgcagcttccagcacgtgtccctgacaccgccccacactggattgggaagggccgctgaccccacgcacctgcccgctggccagtgttggaaggtttgggaaatgagatgttgattttaagctgacttttgagggttttagcttacagctttttaaatcaatcttcgaccaacggtttgaaattccgtgtttagagttgaattactcgattcagaagtttaagtttctctaatttaagctaaagggagaagagatggagcgcctggcttgagttggccgcacgcagctgggaagaaggatctgaaaacactgtcgtccatgtattgattcacttaaacatttgtccgtatctattattttaatttttttataatctacggtcacaagatatgcctgtgttgtttgtgaatagaaaacactgaacaatgattgtgagtcaacagctatcattatttgtgttttggttgtgcgagggtatactaatgtctaatgattggctaaaccttagtcttacatcgctgtctttccttgcgctgtagggcaaggcaaccaccaattgggtaaaagcatataagcaggcttaccgatcaataaatataaaaaagggtagctttcaagaagtctgcttatgtaataccattattttccttttttttacctcgaaggagtgataatcaccaaaatagcattatattgtcatcatacggctgcactatctttttcttctgtaacatgccgtctaattattatcttcagtttcagactcagttatttgaaacatcaagatggttaatttcggaaagaaattgatggctgatcaagtggacgaatggaaagggtatgacttttcttttggtacttatgaaatcatctatttttatcttatcagggcaaatgttctttattttcatatatgcccactccactagtccactaggatacattagaacaccataccgtagttatcaccatatcacagtccttactatcattatctggttaattttataattaaattaaacaaaatctagcagttatcgaattgataggttgcactacaataatgaagtcacttcccgctaatgcaagctaatgtcactttgtttaacggtttatcagaaatcttatcagctttttggtctttccatttctagatactacatcaattacaagaaatcttatcagctttttggtctttccatttctagatactacatcaattacaagctgatgaagaaaatgttaaagcaatatgtccaacaaacccaacatgatgagaaagatcgcgaacaagttcttaaagacttttcaaggtttcttgatgaccaggtatacaaagaaagatttcccttgaaatgatcataatatatgattttgagcatcatctatcctgtcagtagtcacttgtatccttgtaaggaacagaacagtgtcatgcgacaagcttaatagtcttagtgaattgggatcatttttcttagttgtgagctaaaatacacatgtatttcttcgttccagattgaaaggattgtgctttttctgctacaacaacaaggccatcttgccagtaggattgagaaattggcagaaaaacgcactgctcttctggaagagtatgacatatcacaagtttatcagctgcatgatgcatacagggaagtcgggcttgatctcataaagcttctccgctttgttgatgtgaatgctactggtatacgcaagatactaaagaaatttgataaacgctttggctacaagttcactgattattatgtcaccactcgtgcaaatcatccttattctcagcttcagcaagtatttaagcaagtggtaattttcatgcattttgcattttcctttcttgatgtgtgaagtaattcccagtacctattatttatcatggactcatacggatgcagggaattgtagctgttgtaggtgcattatcgcgcaaccttgaatatctgcagcatcatgaaggaagctttgtatccatctatgatcgtccagcagttaccttgaaggtattctattttcactattccattctcatttcagaaattctgctattgaatttataaatgaaaaccttgaaaggtgctctttcttacctcggaactgcatcaattatatttccacatgaagtagggtgtgacatgacacttttttgttgttatattcaggaccctattatagaccaagtaaaccatgcagtacagaaactcacgcatgccacgaattttatgcaattcttgggacagcacgcgcttattgtccaggaagatgcagaaagcgagtcggaggatcttgttggtgatcagagctaccatttcatgtccctggtgcttaatctagtgaacacattcctttacatggtgaatacatatatcattgtgccgactgcagatgactatgcagtaagccttggggctgctgcaactgtatgtggtataattattggatcgatggcagtcgcccaagtattctcctcagtctacttcagtgcctggtcaaataagtcctacttcaaacctcttgtgttcagtagcattatgctgtttcttggaaacctactgtatgcattggcatatgatctgaattcactaatagttctcctgactggacgactgctatgtgggtatgcaattttctcaattcactctatctcacttgatttacgttccacttttgtatgctagcattgatctgggtgaaaattactagtatgacaaatgcaggttgaggatccttaagctgagggcaatattctagaatatttatattgctgaatagaaaacaaaatggaaactgtatatcttacaaggagataaaggattttaaatctcgagactggcattaaaatatatgcttttctatttcttttatagaacttaactagttatccctacctccctttgggctagtaatttgtctatattgtttaaggttcttgattttctgacggtgcatctgtgatcgagctgccagcatgtaatgtgcaggttaggttctgcaagagcagtgaaccgtcgctatatcagtgactgtgtgcctctcaagatgaggctacaagcctctgccgggttcgttagtgctagcgctcttggcatggcatgtggccctgctcttgctggttttctccagattaaattcaagatatactcgctcagttttaatcagagcacattgcctggatgggtcatgtgcatttcttggcttatttacttattgtggttgtggcttacattcaaggaaccagaacacttcactaaaactctggtcaatgaacagccgtcagaatctggtaagctaacaatacactgaaatggcaacatgttttgtttgaattcatgaatatgctcgaatcaaaccttattgtacaatcaggatgtgtatgcttatcattcttaggaacttttctgagatgtttatttccttattatgaaaataggccgccaaggaaattctaacttggaggcaggtctagctgaaccattgcttcaaggtatagaacgaaggcaggatgagaactcagaagttaatgatgatactgaagtagagtcagaaagctctcatgaaccagcaacatcaattgcttcagcatacagattgctaactccatctgtgaaggtttccttccccctcccttcccaattatcgatttttctttgtcttgttcttggttcaaacgtttgaaagaaagaagctcacaatctacatagggttcttttgtaaataaagttagataaattaactatataatataataaaactgcatctttaaatagtaatgggtaaatacattccagttactagtaggtacatctgcatgtcatacaagcaaacataacggacacgccatgtaaaagaaactaggccaacctaggagaaactaggttgcatttattattatattattattaagatgaaaataggcacccaaatttaccttgacaaggacttgaacctaggtggtctgggtttacgagcacacccttgaccaagtgagctagctcagttcccttgacacaccagccagatgaaaagttgcatgtgcagctacccctttttccacgcccttttcatcttccaatctttgttggagctaccttctcatgtattcatatctttaaaaaatggttgtttgtcaggcccagctactgatatacttcatgctcaagtacgcaatggaaatactactatcagaatcgagcgttgtcaccacatactattttagctggtctacaagtgctgtggctatctttctagcgattcttggattaacggttcttccagtaaatgccattgttggaagctacgttacaaatttattcgaggataggtaagctttgtactcttacaaaacatactacatgaaacttttatattctctagacattgtttttctcttaaactgagacatgctttcacaaaataagaacttgctctatcatttgcaggcaaattttgttggcatctgaagtcatggttctcatcggtataatcatgagcttttgtttcacacctcactactccatcccgcaatatgttctttcagctttcatcacatttgtatttgctgaggtgcttgaaggtatgtatgtttatatacattaatggtttgagacagcgaaacctaaatcaatcatacgctgctgatttatcagccactcaacttctaacctcgagctatgcaggagtgaatctgtccttgctctcacgagtaatgtcatcgaggctttcccgagggacctacaatggtggactcctttcgacagaggccgggacgttggcccgtgtagttgcagatgccacgattactgcagccggttatctcggcacggacctccttctgaatgtcactcttctcccatcccttgtgatttgcatagtctccatcgcagcagcactctacacttacaacaatctctattgaagctattgttgctgtacaagtgtacaacaatgttcctaagctaaaatgttcctgcccacaacgggtttgtatatctgttcaagcatggtttgtaaacattttgatcaagtttgtatgcaaaatttcttgtatttagtgcatttatgtaaagattcatcctgtaaagaattataaactatgagacgctattgccatttatgatcatttatgtttatctttttagccttatgttatttgaatttgtctaatcaatgccatcttccatcacgagcacatcattgacatattactgatggatagacctttttgggacgtgagatgctaaaggcacaacctatatagctgaaaatttctaacatatttatcaataataccaagatgcctttgttgtttatcaattgcacattatttcaacgtaaatgcaattttgttaaatatgtcatggtgtcgagcctactgcttaccccagcatgttgaattgctgccttaagcagaaacatcgaaaaacctgcgtagattccacgatccaacaatcctctccgttcatttttttagttccatatgaaaggaccgattacgtctgaaagaagagtttcattagacaatctatttcttttaactaatgcctctagtttttcaaaacctatgcaataaataggtgtaactatagttttgactaagggttgtaatctctttgtaaaatatttatgcaatctcgatttcaaatctatccactagcctaacaactaataagataaaacatacaaccaagatacataatataaatacgggagcttaaatacgatatacatataaactcttattgatgactccattgtttttatcgagataccaagaaagacgcaagtttctccctagtcctcattggagcccagtccgcgcgagtaccaagctctcggtcaggtaacattgtggatagcctaggttttttgccacacacaagtgggtctttagtgtagcctcttctaaatgctctctatcaaaggtggtccaggaaaagattcaaaatggggccctagcagtagtagtattactactaacaacaataatgataaataagtaaatgctcaatgtgcataaaattgatctaagaagtacttgtaaactcatgtaatgttgtaaacttatttgcttatttctttatgtttcttttctcacatccgaacagattccttctagaggacatgattgtaagttaaaa

SEQ ID NO: 696 - protein, 328 aa, Zea mays
MRLQASAGFVSASALGMACGPALAGFLQIKFKIYSLSFNQSTLPGWVMCISWLIYLLWLWLTFKEPEHFTKTLVNEQPSESGRQGNSNLEAGLAEPLLQGIERRQDENSEVNDDTEVESESSHEPATSIASAYRLLTPSVKAQLLIYFMLKYAMEILLSESSVVTTYYFSWSTSAVAIFLAILGLTVLPVNAIVGSYVTNLFEDRQILLASEVMVLIGIIMSFCFTPHYSIPQYVLSAFITFVFAEVLEGVNLSLLSRVMSSRLSRGTYNGGLLSTEAGTLARVVADATITAAGYLGTDLLLNVTLLPSLVICIVSIAAALYTYNNLY

SEQ ID NO: 697 - DNA, 9281 bp, Zea mays
tagatgtgttggcataaatcgccaaaagagggagattgaaagggaaatgtgccttgggcaatttctagttgttttggtgattaaatgatcaacacaccacttttaactaacattgttcatatgagcatgagcacaggtttaagtcaagaaaattgaatatgtgaagtccaaaatgagttggattggaagacaaaaagtgtaaccttgggtaaaactataaaaacagaaggtttaagtatttgaataagttgcacttacactatattttgtttcttgtacctttgtttgactactaacttgtttgtgaaagtaaagtggcattatttggacttagcttgagcatattgcaaaccattttgaaatgaagtgataaatgtatgattctagctcttagtcaattatttttgttgctaactatatttgtctaaataataggaatcattaaaaagagagtaaaaaagaagtgaaggggtttggctcaaaagagccaaacttgggctagactggatttcaccggacggtccgcgtgcgttgggttcacgatagactccgtgttgtgcgtggaggtttctcgctactgttgggagatcgtggggcgtcagagcacgatgagtctggagtagaccccgcgttgtgcgtggagggttcgtgcagtcgttgggaaacgataaacccaatggacgagacaccagggatgccgcatggctgagcgaagcctgttgtgtgcgtacgtactacggatagatgaaaaagagaaccgcatgttagtttataaagaaatatgaggatgtttttttaaaatatgacgcagaactactatcgaaattgatactttaatataataaaaaataatattacgtcatgacattttgtatactgtgatatttttaaaaatgtgttccgaaacactccttaatgatggcaaccaaacatgttctacataaataaccctgatcaacggttcactctcgctcatgtaagttttagaacaattcgtgttgaatgtttgtaggaatcctgattttaaaatatgttaaattttgtacgaggcacgtttactaatgatataggtggtgcttacaggtgtggattttccggagcacacaaatctccatggccaagtttgattttctcccatctttaggtacgttccacaagagggacgtgccatcctcagcctcaacgcggctggaacgatcgatcaaacgagacagacaggctccccgctcccgactgctgcctgcgacgactcgcccgaccggacccttccaaccaagccggtgacggtgaggacgcctggcaagctcgcccgtccacgtgtccccttttcgaggccgccatctcgcccccgcgcttttgtgcgtcagccgccgcgcagcccaacacccgcatcaaaacacgcacctcggctcctcccctccccaccaggcaccaaggtcgccaccgccaccgctgccccaaagtatcgcacccccaaagccccgctccctcaccttctggaaccttcctcgcatggccccgcccccctccatgcctgccgcctccgatcgcgccggccctggccgcgacgcgggcgactcgtcctcccttcgcctccgccgcgccccctcagccgacgccggcgaccttgccggcgattcctcggtaggcttgcgggagaacggcgagccgcaaccgccgacgaatccgccgccgcaggagcagcagcagcagcacgagatgctatactaccgcgcgtcggcgcccgcccaccgccgcgtcaaggagagccccctcagctctgacgccatcttccggcaggtgaggagacgcgaattttaggctcgctgtttgtaagcgattgtttgatccccgcgcttgtgcttcgatccacgccagttgcaaaatcctgcaaattgtttgttgcttccagtcaactctgcctctgtttttttttggttggtgtgtgtgtgtgtgtgtgtgttcaaatcacactttgtgctatcggtagcttaacactgccggttgccatctcgcgcgcacggatgttttattgtgggccttgggcttcggaattgtggatagattgtgcgcgtgtactcgaatgggcacaattcgtttcgtggggggcatatgctgctgcgattgaggtcggtgtttacttgttttgggatcagggggaccagtgccggtgcgcgggtgccagatgcatgccacgcagaatttggcatcggccggctgaagcagcaaacaacgagcgtaaccgttaccactggaggagctttggcttgtcgaaacggatgactggatgagcgaatgaatcattgaattcattgttggcggtactcactatagtgatgtggacagttgttgggacagcacctgcagtgcccccagtattattaatgctgacttttctaactacaatgcgtgttacattgtttgtacaccttggctttcctgcttggggcattgcttcttgttgaggaccatataactgtgcacctacatagaactgtattggaccacttgtaagttttaactggttagccctccattttttaataggtatattattagacaatttttattgtcattgacattatttttgtttgctactctcggagcccttttcccagtgtaatcttaatagggctcaaatcacagcagaaacacgtgagacgtaattttctagtgatacttttattagactttgttgtttctgcacatactctaaatctgttttgaaggtaggagtgcttatttggatgataaataatcctctgttagttgcatgaatatttatacatcacatgcctcctacatggttcctgggattacacagtggacaacgctttgataattgagtccatgctaacttgattataatatatcagtattccatatatcattttatcttgtacttcaactgagatcatccttattttttgcaaaccgtatttattggttgctctggagaattgaagtcttgaaactaagcacttctcctgattgcagagccatgctggtcttctgaatctatgcattgttgttctgatcgcagtgaacagcagactcattattgagaatttaatgaaggtttattactttctttcttttttcattttcctcaccttcatttacagatccctcaatccatctccttctgaaatacatctggtcttcttcctgcgcatttgtctagtgtaaatctgacacattctgtgttttatttaaattggctggtgcagtatggcctgttgataagagctggattttggtttagtgcaagatcgctgggtgactggccccttctaatgtgctggtagaaattgttgtcatttttaattcagatgggtttcaaataagaactgtggagtaatcaatctgtcaatttcagcctcactctaccagttttcccactagttgcactcatggctgagaagctgatcacaagaaagctcattggtgaacatgtaagtttgactcacaagattgcgtagtattttgtagagaagttctcttttgttatttcttaggtataagtgttgaggattgaattagatgtaaaactagacagtcctctattctgcatcttccaggtgccatttatcgtttatgacttctatacacctcttgcaggtggttattctactccatatcattattacaacatctgccattgtctatccagttgttgtgactcttaagtaagcatttctttctgctttgcagtttgtttggatgcatcttattttgacattcgttgagctctagtatttcatggtatggaatacattcaattaatcttgttcgtaatttgctgtacttcatggtatggtggccaactacattattgtgccccaaacatttagtctttcccttcaagatacgtactatactatgcaaattgggtggataaaaaggtagctacataacacttttatttaattgtatctggtgactccacactataatacaaagaaacgcaactctccagcatattcaagaaaaaaatgtatctggtgataaaaatctattgcaaatgttcatttatctctagtagaagaaatccttactatcttactctgtcttgatctgttcactgactgcatctaatagggaagatttgttagtccatcaatattgatacacattttattatgcagatattttgtttctttcatgtagcttctagcttgtaacccctttcctaacatgaagctgatctttccattgtacaagaaaaattggatatatttgttcacatgcttggaaattgaataaacaaactgtagtatttctgatgttgatgtgcaagtagtagactttggttgagtcaattgttatctctcaaaaagagccattaggagcaagttaccttttcattgattatattttctgtgagactgcaagagttaagaatgttgtatggttgatgccttatgctgtttagtttaagtttgttataattgccaagaaatgttacttgaaaagatattgtcccatgcatcaattatggattatcagttcagtcatattccgaaaaatttcaggtgtgactcagcagtactatctggatttgtgctaatgtttcttgcgagcatcatgtggatgaagcttgtctcttatgcacatacaaattatgatataagggtattgtccaaaagtactgagaaggtaatgcattgacatgttaatctgaatcagttcaaatattttgttaacatgttgcccatttctcaaaattgatttgttgacgttcaaacttttcttaaaactccttttggtggccaaatttttctgaagctagaatatctcccacttgtttaaacttcttttccagtttcatttcatgaatgtcttatatctagtttcaatttttgcataggatgaaatgtggtgccaatcaatatacgttaccatcaagagagtaaaaaaattgttcttaacttctcatacagtgtttttgttacatgggctgatcatatatactctcatgtgttagcttaactgttagtgtatacctctattgtaatgggccttggtccacctaaccctgttatatcaatgcattcccaaccctaattagggttagggtttccctcattctaacttcaggcaacggtagcatatgattatatcccttcattttcatttttcatgcaaataaccactattgctatattcttatttttagggtgctgcatatggaaattatgtcgatcctgagaatatgaaagatccaacctttaaaagtctagtgtacttcatgttggccccaacactttgttaccaggtactattattggaccaatgccccgtttttgtttttaatgtctacactctgcttttcttcatcgcgtctatctagttatgccagtgacaacatgaatttcctgatgtcactttggcatgttatgcagccaacttatcctcaaactacatgtattagaaagggttgggtgacccagcaactcataaagtgcgtggtttttacaggcttgatgggcttcataattgagcaagtgagcctcctatattccttaagtaacttgtatttatacataactttggattaaattaccaatttttcttctattttgcagtatataaacccaattgtgaagaattccaaacatccactgaaagggaattttttgaatgctatagaaagagtcttaaaactctcagtgccaacattatatgtatggctttgcatgttctattgcttttttcatttatggttagtatcttgcttcagttcaacagtaccttaaatttgtgcggcagtgattggtttatataacaggttaattgggttttgacctgcatgggactttgatttccattttccatggcattcttgtttgctcttttggttggtttcaggctgaacattgtagctgaactcctctgtttcggtgaccgtgaattctataaggactggtggaatgccaaaactgttgaagaggtgagatgcctgttaaaattgagttcgtttcttttgaagtgagaactttaaataggactgacatcaattatattctcatgtacttaaatgtgatggtattttggggctttacctcagtactggaggatgtggaacatggtaatctttttgttacttctatattcagattctatacccttttatttagttgagactttgttacttaactaaggacagttgtgatggtagtggtactcttctatttagttaagacttccttaacttctgtcactgagcttgagatatttgtctaataatatctttcaaataactgacaattagtctattttttgtcagcctgttcataagtggatcatcagacacatatattttccatgtataaggaaaggcttttccagggtaattgcttctatatgtgtacaaaactctacatttgttctttgcttttgaattctccaaatgcagtttagtttggaacatcgatgcaatatagaattcacaatatacaaatgatgttctttagaaaatggggaagcagagctggacagagtgttagcactcaattgtcaatttgtcataataataatgaatacaactgaacaagtggctgaaactgttgtgagaaaatcagaacactagtggtcaatattatttgcatagtaaatcaatttggtaatgtaaattaagatatgaagttcttacttcttatataaagatttactatgcttgaattttatagtggctgaaactttactgttcttggataaagattttaaataaaaacaaaggatatctagacttggcaacaaaatgctgccttctgctgactggcaaaagtaaattagacaatgtgaatacatggacatacataaaattttgttggtcctttcatttttgcagaactgacatgattttcactgcctacttctcaaattcgtattgtatctacactgcagggtgtagctattctaatctcgtttctggtttcagctgtattccatgaggtactttaagttcttcagaagcctttttcatgatcggttcaatttctgtttttcctaagacatgctattgttcgaattccactcagcacattactaacaatacgtttgaccttacgtaccaatatatcatcaccacatctctttttacattgtgaattcacagatatgtattgcggtgccgtgccacattttcaaattctgggcattttctgggatcatgtttcaggtatagaaataacactaatatataactactacctccattccgaattataagtctttctggcttggcttttctagttacattatactaggtatatatctagattataatagttatatatctagacattgtgtatatctagatgcataccaaatgttacctatctagaaaataggatcatggtttcaggtatagaagtagtaataatataataactactacctccatttcgaactgtaagtcattatgacttggcttttatagataatgctaagagttatatatctggacattatctagatgcgtagctacgaatctaggaaaactagaacgacttgtaattatccctgccttttcttttgagtccatcagtgtctattctcttacgttttgattccatcattacatccataagaacaatactacatcttggatacaatgtaccttccactgttttcacataggctgacactggttgatgtctgactcacagataccgttggtattcttgacaagatatctccatgctacgttcaagcatgtaatggtacgctgtgtcaattatgtcctttttttcccattacctcttgccactacctaaccatcatcttcttatttggcaggtgggcaacatgatattttggttcttcagtatagtcggacagccgatgtgtgtccttctatactaccatgacgtcatgaacaggcaggcccaggcaagtagatagttcggcagagacatgtacttcaacatcgaccatcagaagcagactggagcgacgcggcaggaagcagcagtagcccctcacttgccattgtttaccatcagctagcagctggtcagcctgaaaatgcttctattccaggcggccgtgctgggatgcagcgtgtacattaccagcgatgcaacgtcaacggttaccaagcgcggataagcagtgctcgtggcatgtgaactctgtacacattgaagtctatatgtccgcggtgctgtgtgcataatgtcgtggtagatgtaatatgtacaatgtatgccacgacttaagaggtcaaaatgaggctcacgtcttgggatggagggagaacgactttcaaagaacagacatcgagactcgatgaacttgttctgagccggtaacttcttgtgaccctgtcggctgtcgcgtcgtgtaccaagagcctggttggtagggattgttgtcggcttcacaagctggaaaacagctcctaccaaaatatccatccacccggccgctcaatcatcgcagaagctgcggaattcgagctgagagaagctacgacagaagctgaaaaatgtaacttttggctatgggcgggtttgcccctgggccggcgcgggggcggagggccacggggctgccggagctaaatctgatgggtagtaaactagaaaggaacaaaactgagtaatgatgctgaagaaaactgaacaatgatgtaactaggatacggatttaaaatttcctaatacacacgtgaatcgcctagaacgcatgcactgcagctggtaattcaccatatacgaggcgaccatgcaacatggtataataaaaagtgaacaaattcattgaaacacacccatcattgagatcctggactcgatccaacaaagtgatatctgaacaaaggttactcaaaagcttcccgtgaggaaaaaaaaactcatgaacttggacatgttaagaaactgacatatatggctacacaacaaaattcgtgatctgatggatgtcgtacacactttcgtgtagtgaggatacacaactttggtgaaagaacacaagggcataacctttactgaggatcaggcctacatcctatcatgctaatccaattaattaatcaccatacattcatatgttacacgagaccctcatttggggtcgacagccactcactgcaccaatcatccaagacacactgctctcaagaacggcaaaacccgactttgcccttgcagccgtcatgacgggggaggattgatcttgcactaggagcaagatctgagttgagttctcttgcctccaccctcgtatatctgctagaaactcttcagtacaggtgaaaacactttacagag

SEQ ID NO: 698 - protein, 494 aa, Zea mays
MAPPPSMPAASDRAGPGRDAGDSSSLRLRRAPSADAGDLAGDSSGGLRENGEPQSPTNPPPQEQQQHEMLYYRASAPAHRRVKESPLSSDAIFRQSHAGLLNLCIVVLIAVNSRLIIENLMKYGLLIRAGFWFSARSLGDWPLLMCCLTLPVFPLVALMAEKLITRKLIGEHVVILLHIIITTSAIVYPVVVTLKCDSAVLSGFVLMFLASIMWMKLVSYAHTNYDIRVLSKSTEKGAAYGNYVDPENMKDPTFKSLVYFMLAPTLCYQPTYPQTTCIRKGWVTQQLIKCVVFTGLMGFIIEQYINPIVKNSKHPLKGNFLNAIERVLKLSVPTLYVWLCMFYCFFHLWLNIVAELLCFGDREFYKDWWNAKTVEEYWRMWNMPVHKWIIRHIYFPCIRKGFSRGVAILISFLVSAVFHEICIAVPCHIFKFWAFSGIMFQIPLVFLTRYLHATFKHVMVGNMIFWFFFSIVGQPMCVLLYYHDVMNRQAQASR

SEQ ID NO: 699 - DNA, 3127 bp, Zea mays
gcctgaagcagaaaaaaactgaaagaaacatgacagataattccctcggagaaacttggcatgtttcccgttggtcatgtaggacgacgataatgataaattggtaagcaaagaaaaaggctactaagctcgagcagtagaagctacctagctcgtcgtaacgaagaaacttctcgtccttcaggtagacccttgcttgtttgcagtactttagttagggttcggtctttaattcttttgctgggcagcagtaaacggagatgagaagcgcgagctgatcattgttgccattctgtgcaacgaagctaggggaccaatgctgactcgcacgagggcatagttgctgatggtcatagacgacgcgttcacttaaaataataaagaattataaattgttgtcataagtcgtgcagcctaatataggagagtgcggcattgctgtagctaattaagagagtattccggtcatgcttgagcttggagaatttttgagggtccgttcgcttggagagtcggagatttttgagggcccgttcgcttgcacaataataaacaaagatttgttctagctcatccaaatctatataaattaaagaagtaattcggttaggaatcaatccagagctctaattcttaaaaaccgaacagggcctgagttgtttgtctagacgacattatctgattaagttattttcatcttcaatttcaaatgtgatctagcggcataaaacttgttgtctgacagatatttgacttccacacgggccacagctcaattacaaacatacttcaaacatcaggcagaggcagagcactagcagcattcgctacgtggcggtgggcagcagtggccagcacattcgacaactgccacggatcccgtactacttcaaacacgtatcgcttccagaatccagagtcacacgtgtgcagctgcatgaacccagctcactcccttaagaacagctcgacgctcacctgtctagtctagctcgtgcatgccgccctgagcgccactgcacagacgcgcagagacagacattgcgactttgcgagagacaaaacctcccagataacgcccgcgcgctccccgatggcgtcgtcgtgccagaacgtggagattcccggcaagccgacggagacggggacggcgctgctggagacggcgacgggcaccatccaggggttcgcgccgctgagccagatccaccagcacctgtgcgcgttccacttctacgcggacgacatggggcggcaggtggaggcgcaccacttctgcgcgcacctgaacgaggacgtgcggcagtgcctcatcttcgacgggcccggcgccggcgcgcgcctcatcggcgtggagtacatcgtctccgagacggtgttcctgacgctgcccgacgccgagaagccgctgtggcacacgcacgagttcgaggtgaagggcggggtgctgttcatgccgggggtgcccggcgtggtggagcgccgggacctggagaaggtgtgcaagacctacggcaagaccatccacttctggcaggtggaccgcggcgacgcgctcccgctcggcctcccgcagatcatgatggtgctcacccgcgagggccagcttcggcaggacctcgctgactgtacggcgtgctcgcagattgagtatctgtgatctctctctgatctctctttttttactgatggatttgaacctgcaatgtacgtgcaggtgtggagaagaagttcggtgtctccttccagaaggagagggagaaccgggcgtacatgagcggaccggagcatggtatccacccgctagcgaacgctaccggcaagggcctgaggaccgagatccgtgaggtcgatttgccggcgagtactaccgccggcgccgggagggtcttcacttgatcgccgtatcgtgtgttgccgcggcgggtctgcgtaatgtagactatatagacggtgcttggtttggtctgtagttcgtgagtacgtgctcaatcgtttgtgttctcttaagacacgaactactgttcatatgaactttgaattttcgcataataagagatggcgctctactaataatttgtgtcaaaaccgttttggttgaactcttggatttaggatgggataatgaatttcatacagtttgcatatattaatgccaaatatctcctagaaacttgtccttaaaatgataccaattggtgaatgggaaggtaaacatcttcacaagatgttttaaaatagtcccccaaatattaagacactacaatcatttaaattgcttattacatagttaagtcctaaatcatttattttgttatataggggaaagagggtgagtcatttattttgttatatatgggaaagagggtgaggtagaaaataaggattgtgcattaatctgtgggtgtaaattacattatacttgagaaaacgttgaggatgatggggtgtaaattacattatagaaaaacaaggatacgacactgataggacattaacccattaacctagggtgtaaattacattatatttaggtcacttttttttataaaatttgcaaaataaatattgtttttatgagtttagtagggtattgatttaaggcacaatcctcttaattagacaagggagaaagtagctagtgctttaagttctctcaatgctttaagttctctcaatttctctcaattagataagggaaatgtgctttaagttctctcaatttctctcaattagataagggaaatgttagctaagactgactgcagcggtcgaccctaccgctccccctccccttgcatgtcggctgtagggggcaccttatggccgcagcggtgcccctacaacgccccctacgtgtcggtccccttatctctcccccccagatctaacgtgtcactgttcatcaccctaaacactgtgttgtgggtccacgagtaattgttagtagataaaaaattgatagttggtatagaaaatgatattttatagtggtagtggggtatagggggagggagcaccttatggccgcagcggtgcccctacaacgccccctacatgtcggtccccttatctctccccccagatctagcgtgtcactgttcatcaccctaaacactgtgttgtg

SEQ ID NO: 700 - protein, 238 aa, Zea mays
MASSCQNVEIPGKPTETGTALLETATGTIQGFAPLSQIHQHLCAFHFYADDMGRQVEAHHFCAHLNEDVRQCLIFDGPGAGARLIGVEYIVSETVFLTLPDAEKPLWHTHEFEVKGGVLFMPGVPGVVERRDLEKVCKTYGKTIHFWQVDRGDALPLGLPQIMMVLTREGQLRQDLADCVEKKFGVSFQKERENRAYMSGPEHGIHPLANATGKGLRTEIREVDLPASTTAGAGRVFT

SEQ ID NO: 701 - DNA, 5558 bp, Zea mays
ctattatgtaatgcttattgacctgagtaaaatgcatgtatataatgttagtttgagttcaagtgggcataaaatgctatagaaagtccatacttgtgaaaacttatttaaacctttttaaagtcggtaaagccatattttagggaagtctgagttaaagttataatttagcatggttgtgtaaatgattatgatatgtacccagggtagagatcatcccataaatataaagtgtcatcgtcgcttgatggcctcgaaccatatttgtcatcattttttatcttttaacacccttttgtcttttgtcccataacccaactttttcaactccatttgatgctcttcttcatctgcatagcataagaaggcatcctagttggtgtattgagcctagggcacataggcatgcaagtgctcaaagtgggacccctctcaggcgagcgttcgatgattctactgtcaaaactggctaagttggtttctaaatctgacttagctagaattcatagaggagccacaaaggtgtgtatgtgagagttgcatgagtgtgctcatgtgatggcgtgttctagcatcgaccgtaactgatgtgattgtcacttttgtttgtttttcatgtaggaaaggggaaacatatgtgcaagatgagaagcttgtagtgtaagatgagtgtgagcactgcaccattgattttgtcatgattgtcaagttctccaccgtttttgttgtatgtgaacagaagagaagacttgcaagtcatctaggtgggcacaacatccataagaccatgactccatgtgtgccatgcatgtgtcatcaactaacagacgcgcactgcatgtttgcttgcaaagaaatctggcaccgtttccaccacaccatctactagctggctctccatctgtctagtctctagcccactttttgtacattagtccctcacaccatacatccatcttgctcactcctttttctctctataaacaactaaaggaggcatctctcacatcatcatcatatctctttaccccttcttcccagcgacaagagaaaggttagcacaacatcgagcccatcctatgtactttgtgatccttcttggtgttgtgatacaagtttggttgatagatatgttgattttaagaaattttgattgctttacttgctagaatcgatcgatcctttacatgataggcgggtgtatatatgtaagtgcttgttcatggatctatgctatatttgctataggattagaaaaaggaaagatccatggacatgatctccggcagcactgcagcaacatcaacaccccacaacaaccaacaggtaaattggtgatcgtatccttgcgttcgatcctccctttcatgtttgctactttcttcccatatatagattgatgtgtaggtgttgctcatacatatttgttaacctttatatatgtttttccttcttcaattgatgatgcaagtccatttctttctcttgatttcaggtagctagctcattggtagaattaagacgtacacatatattggtacatatgcaagtactcattagatagtgcatgaatattctacatgaatcaggcaatggattagcttccaaattaattcaaagctccctacaattttcaatttatttcaactataattatttaattataacatgcataattaacaagtatctaaaatttatttaaaacatagctatcaatgcatttttggtgtgataggatctttacaccatgtatcttcttcccttactttggtgaccctaatgagattaaggttcagggttggtgctacctatagtcatgtgaggcttgagggaaatcctatggtggtagagtggtggaggaggatgcgataggctaagggctacgagattacaacattaccacatccccaaaaaagccaaattagtatcatgatagatgtagcaatgataaggatccaccaaagattaataagggcgttagagtgaaagtataaaggcatggtggagaaggtgaataaggcactgttggtggggttagggggactaagtttgagagtgtaaggtggtcgattggtatcagatgcgatgcatatgagacacaaacattagcatatcgagcatggtgatctagaatgttagggtgacacccatcatctatcttaggtgagctggtagtatgggacacaagagtgtgttgggtatggtagtgatggaaacatgggtgacaagtaggttctgatttatggatttaggcttaaatagggtagtaaaatgaggcaatgaaccacactgattggtggcttaatatttaggtgttaggcttcctaatgccgagtaggtaatgtatatggtccctatgagacgatgagattggtcaagacaaagtagggaaatgggccaatgatagttatcccatggattgacagttatacaatttactagggatagagaggatgaggcatgttggagtgactaatttgtgttgaaagcaatgcaagtgagacacatacatgggaaaatcaaagatggggcttaagtgcactagggtgtttatcagtatctaatgccaatgagcaaggaattggcactagtgtagggctagatgaggcaatagtgtgttaggtatggtaatggtgacaccatagataactataggggaggtgtaaaggatgtgacccagtttgtgattagggttaaatggggttgcaaatggattattgaattaaattgattggtgtccaaagattttggtgctaggtttcatgaactatacaagtgggctagggatataggctctatgggatgatgagaccagggaaggcaaaagtgtgacctataaatacacattctattttggtgtgtcatacatacatatggaatggaacacaatatacttatctaccctaaaaaggtaagattgtgctcatcactaggggtgcaaacaaattgaatacaaatggataccactgatactatacatgtagtatcaactatgtcagtttatatactaatggatattgacatcataaatatgtgatttgattattcgtatatggatacaatatcgaatgttgaaatagccaaacttgaacatggacgaatctaaactcttctaaatggatttagactcagatacatcaaaaagtatatgtaccatttgcatccatagtcatcacacattctattcactatagaaaattaccgctttatttccatctaaaaaggtagtacacatttcatcctatggttttgaacaagtttatgcttcatgattatttaatctgttaaaacactaagttaggtgataagtgtaatactatagaattatttttctttgcttatggagataataatggctctcacacacataaataatttgtgcatccataatgtatttggtgtaggcggtgatgttgtcatcccccattataaaggaggaagctagggacccaaagcagacacgagccatgccccaaataggtggcagtggggagcgtaagccgaggccgcaactacctgaggcgctcaagtgcccacgctgcgactccaacaacaccaagttttgctactacaacaattatagcatgtcacaaccacgctacttttgcaaggcttgccgccgctattggacacatggtggtaccctccgcaatgtccccattggtggtgggtgtcgcaagaacaaacatgcctctagatttgtcttgggctctcacacctcatcgtcctcatctgctacctatgcaccattatcccctagcaccaacgctagctctagcaatatgagcatcaacaaacatatgatgatggtgcctaacatgacgatgcctaccccaacgacaatgggcttattccctaatgtgctcccaacacttatgccgacaggtggaggcgggggctttgacttcactatggacaaccaacatagatcattgtccttcacaccaatgtctctacctagccaggggccagtgcctatgctggctgcaggagggagtgaggcaacaccgtctttcctagagatgctgagaggagggatttttcatggtagtagtagctataacacaagtctcacgatgagtggtggcaacaatggaatggacaagccattttcgctgccatcatatggtgcaatgtgcacaaatgggttgagtggctcaaccactaatgatgccagacaactggtggggcctcagcaggataacaaggccatcatgaagagcagtaataacaacaatggtgtatcattgttgaacctctactggaacaagcacaacaacaacaacaacaacaacaacaacaacaacaacaacaagggacaataaggttagtgtgccagaccgtggaagcgttgctgctataaataatgcaattgggtagtagtacccagtgaaatcaggagagactagtagcctagggtgcattttgatttatttagttttggtcaagatgacaagtcatcatgaatcaccctttttattcatttgcatgttttgatgagagttcatttgcagtaagctatatatcattggataattaatcatttggttggatcatcagttcctatgggcattttcttcattttttctattctttaatttattaactaatgtatagcttttccaacttaactacttaatttggatagatgaagcatgttgtttaacatgaattatggtagccagaaccgtatctatatactattggtaataacaatttgttgttgcatatgtatcttttgaatgttttattccttttgtttcaactttcaatgagaaaatttaacaaccttagttatatgaggctatgcatggacctcttattgtcttacatatgtgcatgaaacacaacaactacttgcttcatatatactatagtctacatgtcacacacaagtatgcatgtatatatagtatatggcacacacaatttacacatttccacaaggtgacatatgtgtagaaagaggatccacatgttatatgattcatcagatattattaaaagtatagaatataatattggaaattaactaaaagaatggactactagttaggaaagtcgcaagttgagtagcgatggggcacatgtcttggcttcccaagaaaatacaatacactggcaactgtcatggccatgagatgcttcgttggattccaactcctactaggccttgcattcatgtttccatccttgtatatagtatgaaaaggcaataaaggcacacatcttttactttgtagctatgtcattgctatatcattgtacatacaacacctacaacctgatgtaaaagtgacacacacacacacacacaaatgcaaatcaatcttgagctgcattgtcaactatggacttgtttgacatagctctacgtgagatctaggttggatatctagtctgaagcaaaaataaagtggtttacgtatttgtggttgtggtcaatctatatttaaacataatggtttatttaaaagctcttatgtaccactagatgcaaattcaaaatatcacaaactaattaggttcgtagatctcataagggatgtcgacaacaa

SEQ ID NO: 702 - protein, 325 aa, Zea mays
MDMISGSTAATSTPHNNQQAVMLSSPIIKEEARDPKQTRAMPQIGGSGERKPRPQLPEALKCPRCDSNNTKFCYYNNYSMSQPRYFCKACRRYWTHGGTLRNVPIGGGCRKNKHASRFVLGSHTSSSSSATYAPLSPSTNASSSNMSINKHMMMVPNMTMPTPTTMGLFPNVLPTLMPTGGGGGFDFTMDNQHRSLSFTPMSLPSQGPVPMLAAGGSEATPSFLEMLRGGIFHGSSSYNTSLTMSGGNNGMDKPFSLPSYGAMCTNGLSGSTTNDARQLVGPQQDNKAIMKSSNNNNGVSLLNLYWNKHNNNNNNNNNNNNNKGQ

SEQ ID NO: 703 - DNA, 4870 bp, Zea mays
gggagccggggcgcgggtgtgaactgcggtgggcgcgtcgacgggatgagcggccatcgcgtggggagcgggcgtggtttgggggctgggggcgtcacggggcggagttagggagcagaggcggcggtcacggcgccaaggctgcgtggcgagcaggcaggggattgtgcggaggcctgatggcggctacgacgcgataggttttcgggaagctgagcgctgcgggatgcgcggggtcgggcgggggcatggtgatgctgtggacgccctcgcaccacccttaaggattagtagagatatatgtgcacatttgttatataaggaagctagagcggagaagtgtgcagcctgttggctaattaataagtgataagaaaggttataaattgatagtaagcatcgtttattggataactagtctagattaattgctccaaaatatagcaagtcacagtgaaaaaaacaaaaacctaaaactacgtacatatatatatatatagcatgtaagctgagatttctgtttatgctttcctttcgtttaatttggacagcagattacttgtacgcatatattgtcattatcacgataaaaaagtaaagatcgtgtaccctttttgtgtttcttgcacgtagttcgtcgtccacatgaacctcaaagttgtgtaggtagaacagaaagtgcaatacaatacatgttgacgttggtaaggcatggtgtctagcacacaaagccagtgcaaaactcgttatccaatccagtggtttaaaggtagtagaacacacacgggcatgcatgggtacacgcttggcttattgctaacacgtgtggttaaaacaaaaacacacatgcatgtagcgtcacgataaaacccatggtacgtaacttggtagcgcaccatctagctaactttgctttctgttagcctttccaaacaaaatcacttgtcctatttgctgccctgcaggttcacattgagtgcaaggccgatgcatttttttcttctttttttttgcctctccagaagtttctgcagggaggcacagcaagagagagagcccagcactagataagtagggggggaaagaagagcatccaagcgtactcctcgatctccttcaagcagctaacataattaactcatgggtgcatagagatatgccgccgacgacccatcatatctatgggtccctccccttgcactgcatctccttcaattcctagtgtttgcttctccctttcttgacctttgcttggaaccattgattgatagttacttattattgggcatggagcacgtcatctcaatggaggagatcctcgggcccttctgggagctgctaccaccgccagcgccagagccagagccagagcgagagcagcctccggtaaccggcatcgtcgtcggcagtgtcatagacgttgctgctgctggtcacggtcatggtggcggcgacatgatggatcagcagcacgccacagagtggacctttgagaggttactggaagaggaggctctgacgacaagcacaccgccgccggtggtggtggtgccgaactcttgttgctcaggcgccctaaatgttgaccggccgccggtgatggaagaggcggtaatgatggcgcctgcggcggtgagtagtgccgtagtaggggaccccatggagtacaatgccatactgaggaggaagctggaggaggacctcgaggccttcaaaatgtggagggtatatacactgctcgctcttcttccctatctttattattccctcgctatatcttcggcggtttactcgtcttttatctcttattttacacttcattgttgtataaatagtacaaaacaatgttttacacggcctgtactgtactctctatgggctacagggtttgtagtagtacgtgtgtcttattaactgggggtgcaataactgaaatcggccggtgccttttctgacgtactaagtttgtatcacctacatctagtgcatccaaacacaccttctaaaagtgatgagggtaggtaatccatgatctagctatagagatgtggtgttctcgttgagctatatgccatgtttggctatacaaactgccaaacaaggatgccacatcacaagtcactgtgcttagcttgttctgtatatatgtatatagcgctagctagtgtcacgagatttgtgatgttggatttagcttactaggttttacaccacgagtcatgtaaaacctagtaaactaaatccaacatcacaaaacctagtaagctaaatacaaactagcaatccattcttagcttactagttttttttcaaaaaaaactacgatagccactcgatctttacaaacttttatttgttgaattttaaaacttgaaattttggcatatatacccatccacaggcggcctccagtgttgtgacctcagatcaacgttctcaaggctcaaacaatcacactggaggtactatatctactatatatatgtgccattattacattgtttacagacgtgcttttgtatatagatatatatcctgactctcgatctggctcacttaggtagcagcatcaggaataatccagtgcagaacaagctgatgaacggcgaagatccaatcaacaataaccacgctcaaaccgcaggccttggcgtgaggcttgctactagctcttcctcgagagatccttcaccatcagacgaagacatggacggagaagtagagattctggggttcaagatgcctaccgaggaaagagtgaggaaaaggtaattccggttgatttgcagcttattaattgtacggtttttttttactcctgggcttatcgatctgtcacttgattttaattagaaaggaatccaatagagaatcagccagacgctcgagatacaggaaagccgctcacctgaaagaactggaggaccaggtactgatgcgtagcatcacaaactaaaccatcgatcgtcgttccatttgcctactgaaaccctaaaaaaaaagggttttttaagctggtgctttccgttttgctggtgtagtcgtgttttttcgttcagttttgccgtgcttgaccattatattacaggtagcacagctaaaagccgagaattcttgcctgctgaggcgcattgccgctctgaaccagaagtacaacgacgctaacgtcgacaacagggtgctgagagcggacatggagaccctaagagctaaggtacgtaaccgcggcgttctccttattttatgcttgaacgcgtcgacgagcgagcttgcgcgcggtaatggggaggtatatatgtctggttgcatgcactcttgcaggtgaagatgggagaggactccctgaagcgggtgatagagatgagctcatcagtgccgtcgtccatgcccatctcggcgccgacccccagctccgacgctccagtgccgccgccgcctatccgagacagcatcgtcggctacttctccgccacagccgcagacgacgatgcttcggtcggcaacggtttcttgcgactgcaagctcatcaagagcctgcatccatggtcgtcggtggaactctgagcgccacagagatgaaccgagtagcagcagccacgcattgcgcgggggccatggagctcatccagacggcgatgggatccatgccgccgacctccgcctccggatctacaccgccgccgcaggattatgagctgctgggtccaaatggggccatacacatggacatgtattaggcactgcgggtttcgtgatcgctgggaacattttatttgcaggcgtcgctgaataaggctggttgtctcgatctcccttgacatgaaatccaaataactcacaattaaccatgagtgttccgtttggtcccagtttcgaaggtattgttaatcataatagtgttgttctgtacttcactccatctaccactaccggaatcagcttctttgccgtgtgtctgagacacacggcaaaggctattttacactcggcaaatgctttgccgagtgtaacactcggcaaagaacgctcggcgaactgtacatcggcaacagcatctttgccgagtactttttgtcgggcactcggcaaagactttgccgagtgccatttggcactcggcaaagaaaagtcaccgtcacggcgctaagtgacggtgacggatccttcgccgagtgcccacggcgacactcggcaaaggaggtttatttgccgagtgtcaggtggactggcactcggcaaagaaccctccagtggacccctttgccagttcctttgccgagtgccttggcagtggcactcgacaaagacatctttgccggttcccaggtttccttctttgccgagtgccattttcagcactcggcaaagacggctttaccggttcccaggttgcactcggcaaagaaccctccagtgggcccctttgccagtccctttgccgagtgccttggcagtggcactcggcaaagacatctttgccggtacccaggtttccttctttgccgagtgccattttcggcactcggcaaaggctcggattccggtagtgtacgtgcgagaccttcgtattattttcatcaaattatattttaaaaaaatcatatcaagtaaaaagctagggttattatttggatcacgggcctatttgaaagcacaccagttttttaaagcccatttttatctccagtttctaaaaactagtttatgaagaagaagatagacaaaggtgtttggagctcattttttttaaaaaaaccagtttctagttttttataggcaattactaggatacaccctctataatttaaaaagcggtgacaatagatgtaaatttcatgaaaccaacaggggcaatgatgtaattaaaca

SEQ ID NO: 704 - protein, 441 aa, Zea mays
MEHVISMEEILGPFWELLPPPAPEPEPEREQPPVTGIVVGSVIDVAAAGHGHGGGDMMDQQHATEWTFERLLEEEALTTSTPPPVVVVPNSCCSGALNVDRPPVMEEAVMMAPAAVSSAVVGDPMEYNAILRRKLEEDLEAFKMWRAASSVVTSDQRSQGSNNHTGGSSIRNNPVQNKLMNGEDPINNNHAQTAGLGVRLATSSSSRDPSPSDEDMDGEVEILGFKMPTEERVRKRKESNRESARRSRYRKAAHLKELEDQVAQLKAENSCLLRRIAALNQKYNDANVDNRVLRADMETLRAKVKMGEDSLKRVIEMSSSVPSSMPISAPTPSSDAPVPPPPIRDSIVGYFSATAADDDASVGNGFLRLQAHQEPASMVVGGTLSATEMNRVAAATHCAGAMELIQTAMGSMPPTSASGSTPPPQDYELLGPNGAIHMDMY

SEQ ID NO: 705 - DNA, 5432 bp, Zea mays
gcgaaagcatcatctaatacagtatgtaatgcttgcacaccggtcgttttgtttgttactagttagttacaccctgcatcggtatatagtttctatataagatatatatatatagttttttttacaacacaaaccaacatgagctgcagtggttagaggtgagtgctctctttctagggagtagagaccaccattcaaatcctgacatgcatctaagggtctccatgcgcgtcttacaaagaaatcgtagtgatgtatgggtaactaacttgcgtgtgtgtatatatataattcgtggctttaggtgatgatcgggtgaaataacttaacaaatttaagttatttatatttgttaagtcatttcagggtaggtaattatctacctagctagatgataaatagggatgcctcatatatatatatggtcgaaggttattacctatggattatgctagagatatgtcagaacaatagtgttatcaggacttgttcttggaaactttctgattcattttgaaatatatgcagatcgatgttataacaagcatcggcggctaaatgagacaggttcaaagctaaagatgcacgatggacgatgtgcgtcatatttgagacttagcttgctccatcagccaggcacatgcacatgcacgcatgaaggctggctggctggctgtgtgtttagaattgaaacacaggttcagagctcaagtacataggctgtgattctctcggatgatgcatggtggggtcggaatgaatgagaatcaaacgcatagcgactagcgaacctattcgatgcatagatgcacatgcacatgcgcgcgcgggaatgaagcaaagaatggacgagagtagctcggaatggcgtgctggccgtggggtcctgagactccctgcccgctcgtcctgcatctctctgctgcctgcatgatgatgcacggagagcagcctagctcaatgcagcagcagcagcagcagctataaataaacaggaaccagcgggtgcaactagtaacacaccactgaactgaactcccagctgtaatctatctccttgcagtaagcaagggcagcgagagtacgacgacgacggcccagcaacttcctcgaacagagaaaaaaaaaagaacagcacctaacctagggaaggcaagtggttttcagaaccctgttgcgatcttatcgcatcgtatttgctgtgctgggttaaattccacgacgatccggccttgctcaggtgactgttgcgtacatacgtaggatgtgtgtgtatgcgacgacggcgacgactatgtgagggtggcatcaaaagcggcggcgcgtgcagtttaggtagacgctgtttcccgttgacaccgcgtgccgccactgcgcgagtcggtcacgcgccccgcccgtcgtctgatgccttgcactgcactgcactgcgcgcttgcatgctcaacccaagctccccggcgcgcgcggcctcgatggcgactggtcggggcgggaccgcgggagcgggcgcgggcctttataaaatggcacgtcgtgctcgcagccaggcagccagccacgcagcaggagcagcagcagcagatctggcaggagctagtgatcactgacagtgacaggtcagggcatcgctgcctgccgtcacgtactacaagacactacggtatgggggtgcagagtgaaccgccgcttcgattctgacctgttgcctccttggacactccgcagattgacatggcggagaacaacgtcgtggccacgtactactacccgacggcagcgccggcggccatggaggtctgcggcgcggagctcggccagggcaagcccgacaagtgcttcgacgacgatggccgccccaagcgcaatggtacgtaggtttgatttcaactaattggaggtaacgatgtaggctccattcgattcgtgatgtgtctattatcctgctaatttcaatgcatagtctattttaaaatattaaactgaactctaaagtgaatgtctcttaaaaatttaaatattgtttgttcaatttatatcgatttggtacaattaatttgtatttacctctaattttctaaatatagaggaggtcaaaggagctaaaatcctcgtgctatttaaaactgaatagaaagagaatttttgtccatcaaatttcttcggtatttttgctcctaaacatgcttgagtgtttctgcgaaattggacgaaatttttttctccccgcgggaacggagaccggagtgccgctattctacgatggaaattttcccgctgcaggcgcacaccgaacaattccaatttaataaaatcggctcgctcgattgcacggcccgtaggctagcgagggaacgtccgtcgacgtgtcagcaaatcatctcgggtctaggcgtctagcggatgcacgccctgggagggaccatgattttttttcccgcttgctgccgtgttaacgttgagtgctgatgtgcattccgacgtattgggctgcatgcatgtgctacagggacgatgtggacggcgagcgcgcacatcatcacggcggtgatcggctccggggtgctctcgctggggtgggccatcgcgcagctcggctgggtggccggacccgtcgtcatgctgctcttctcgctcgtcacctactacacctcgtcgctgctcgcagactgctaccgctccggcgaccccagcaccggcaagcggaactacacctacatggacgccgtcaacgcgaacctcagtgcgtgcccctccgccttcgtccccctccttcccacgtctctgcattgcgactttgcgagagttggagacccattagctagagcttactctgtgcatcccgtggactggaatttcgtcgagcaggtggcatcaaggtccagatctgcgggttcctgcagtacgccaacatcgtgggcgtggccatcggctacaccatcgctgcctccattagcatgctgtgagtgaacgcagcctttcatctggacagtgatgcatgaatgtcgtacctcctgtgacttgatatacatatggtgtcgtgttggtgcgccgcaaccgcatgcagcgcgatcaggagggccaactgcttccaccagaagggacacggcaacccctgcaagatctccagcacgccctacatgatcatcttcggcgtggcggagatcttcttctcgcagatcccggacttcgaccagatctcctggctctccatcctcgccgccgtcatgtccttcacctactcctccattgggctcggcctgggcgtcgtccaagtcatcggtacgctgcaggcacacgccgtgacgcatgatgcctttttttttcgctctggcaaacatcaggtcatcagcaggcagtgccactaggacttaccatgagtgcgatgcaacgcagcgaacagaggcgtgcagggcagcctgaccggcatcaccatcggcgtggtgaccccgatggacaaggtgtggcgcagcctccaggcgttcggcgacgtcgccttcgcctactcctactccctcatcctgatcgagatccaggacaccatccgggcgccgccgccgtcggagtcgacggtgatgaagcgcgccacggtggtgagcgtggcggtcaccacgctcttctacatgctgtgcggctgcatggggtacgcggcgttcggcgacggcgcgcccgggaacctcctcacgggcttcggcttctacgagcccttctggctcctggacgtggccaacgccgccatcgtggtccacctggtcggcgcctaccaggtctactgccagccgctgttcgccttcgtggagaagtgggccgcgcagcggtggccggactcggcgtacatcaccggggaggtcgaggtcccgctcccgctcccggcgagccggcggcggtgctgcaaggtgaacctgttccgggcgacgtggcggacggcgttcgtcgtggccacgacggtcgtgtccatgctgctgcccttcttcaacgacgtggtgggcttcctgggcgcgctcggcttctggccgctcaccgtctacttccccgtcgagatgtacgtggtgcagaagaaggtgccgcggtggagctcccggtgggtgtgcctgcagatgctcagcctcggctgcctcgtcatctccatcgccgccgcagccgggtccatcgccggcatcgcgtccgacctcaaagtctaccgcccgttcaagtcctactgatcagattcacggcctacgggagacgcagcagcatgtggtatataggcatatactagcaaccatgttcgtgagttgcaactcataagtacttaaatcagactctgcatcattgctaaacgcgagtttttttaacttgtatacgcatgattcatgagtcccaattacatatgaaaaggatgcaacacaatatatattgaaatataaaagatctcgtaccgatagtcgctaaacatgggcttttttaattcgtataaatataagttatataaaatacgagagcataattttgaacgtaaaaaaacgtaaggaggatgaaaaaatagatcttcaatattagacatcaagatgatagaaattctcatgaaaagcactcaaatacaatacagtgtctcaccgtttgggggaaaaaatgtgatgaacagttatgacatgcggccgcttatattccatttaaatctggaaatcttgataatccagaagagcgtaacgatagtatctatcttcaacaacggaggctcatgtagtagacccggtatcaactatcattagagatggccaaacgggccgcccggctcgggcccggtgaagcctggctaaaaaccgggtcgggcctgctgagcccgcgggcttaattttctgtccaagtctggcccacagcgggcctaaacaggccgggccggcccgtttagcacgaaaaaatcgagccgaaaagcgggctaaacgggcaggtaaacacgttttagtgtaaaaaacgggcttaacgggcttaggccggaccggtttagcccgccgtgcctagtttcctgtccaagcccgcccgcttattcgtaccgtgccgggctcggaccggacctaaaaagcaggcttcgtgccgggctcactagcctcgtgcttattggccatctattcatactcaaggctaggcttgaaacttgggtgcgtgtgttgctggcatcatcagaggcccatgggccatggctccactattggatcgagccatcgaggccagcgcgattctgttgtccgtcagcatgatcgaggcttagctgagcattggcgcgttctagctgctgagcatgtggcggacctaggctctaggccttctccgttcgtggcaaatctaaccgagaatattattgagatcaatagtgttaactttactatttaatataaacttttttaaactttaacagtattttgttaaaggatttaaaaattttatcaaggtca

SEQ ID NO: 706 - protein, 494 aa, Zea mays
MAENNVVATYYYPTAAPAAMEVCGAELGQGKPDKCFDDDGRPKRNGTMWTASAHIITAVIGSGVLSLGWAIAQLGWVAGPVVMLLFSLVTYYTSSLLADCYRSGDPSTGKRNYTYMDAVNANLSGIKVQICGFLQYANIVGVAIGYTIAASISMLAIRRANCFHQKGHGNPCKISSTPYMIIFGVAEIFFSQIPDFDQISWLSILAAVMSFTYSSIGLGLGVVQVIANRGVQGSLTGITIGVVTPMDKVWRSLQAFGDVAFAYSYSLILIEIQDTIRAPPPSESTVMKRATVVSVAVTTLFYMLCGCMGYAAFGDGAPGNLLTGFGFYEPFWLLDVANAAIVVHLVGAYQVYCQPLFAFVEKWAAQRWPDSAYITGEVEVPLPLPASRRRCCKVNLFRATWRTAFVVATTVVSMLLPFFNDVVGFLGALGFWPLTVYFPVEMYVVQKKVPRWSSRWVCLQMLSLGCLVISIAAAAGSIAGIASDLKVYRPFKSY

SEQ ID NO: 707 - DNA, 5683 bp, Zea mays
gatttggcagtccttcggaagtttcaccggtttctttttaatttaaacgtcaaaccggttgcttttccagttttagtggttttttatttgaaaacggtttagcagactttaggtggtaatggatcaagatccaaatgttttctccaaaattaatttgagtccttaattaattttagttttaaaaaataacactcttaatcttatctaatccttaaattttatagtataaaatttagagcttattattactacccctatgcatactacgtaatgtattttacctttttttttccgttccactcatactcctacagtggtagtagctagacagcagcccttatccgaaaacttatttggccaacgaggccaagccattgttttttggcgtatgatttcccgtcattattgttttttgagtttgtgaaacttttggtctatggatttttgtgcatgcatgcatatgcgtcatggatgaggaaactttctttggcagtttacaaaactgactcgatctcactctgcatgccgccttgtagtagagtgaaaatttgactctgcatgtactccatccgtttctttttatttgtcgctggatagtgtaattttgcactatccagcgacaaataaaaagaaacggagggagtatcagtttggagcatgcagcttcagacgaccgaaaaccccatatgcaagtacaccgccaggtcagtgagccccaagccacggcactgacggcagtcggcagcagcggctcggtcagggccacggcccacgccactagccgatcgacggcgctcgccgggtgaaaaaactgcatatattttgatatttttatagttttttcaatagattctaaggccaactgcctcctccgagcaggtcgctcggtctcgctctcgccgcgcgctgcgcgtatgcgctttccctatatttcggcgccgcgcgccccctcttccctccgccgccgcaccgcgcctcgccaaaaaaaaaaaaacgttcacagccgtcttccccctcgctcgtctccaaacgaggtcgcttcactcctccaaagtccaaacccggggcattatcgcgcgtgaggtagggcgagatggcggcggcggaggaggaggaggagtgggaggatgggcgttcggtgatgccggaggaggaggacggagacatcgaggacgtcccaccgccgccgctgctaggcaggaacttcggcagcgaggacgaggacgaggacgaggcgggctcgttgaactcccagtcccagtggtggccgcggagcttccggtacgtccgcgcgtggtgcattctctacgatctcattcctgcctcgaaagccacgggcgatcttgttccgaaacgattaacaaacgatcgtgttgacatgttacatgtcgtttatgttttttcaaacacccctagggaagcgactgacacctataccattgccgcgcccccgggcctccgtcacctcgtcgtcggtgactgcaatggcctgggctctgacctgaagctgcctcttctgtcggacaagctagatgggaggcaagattcatccaacaacttgctgccagtagcagaccccttcggttcagtgctaagcgacgggagattctcagatagagtgcaacaagccccaaccactccaggatgcaatctgacgcaaaccgtgttcaatggtacagttctacccttgcaatatactgtaactgaaatgacactttcctagggttggacgtgtctcatgttttgtcttgtcgttggcaggggtcaacgtgcttgctggcattggcattttctctgctccatacacgattcgtgaggccggatgggccagccttgtggttctggcttttttcgctgtggtgtgctgctacactggagttcttctaaagtactgctttgagagcaaagatggtgtcaaaactttcccagacattggggagcttgcctttggaaggatcggccggtttctcatttctgtaagtcctggtttttgttagcatgaaatttaatttattgcacagatcttacagataagattttagaacgtgtgagcaccgagccaccacctcttctcattttaaaaatcagaaataaaacacagttggcgatttctatattcctttcatgactatctcacattacgtagataaaacagagtcgtcggcacagataaaccatatatatatcgaaatctccaagactctaaccatttgatatttgtgttttgtttgtgcagatagttctgtacaccgagctctatgtaaggaacccattttccctggcttatattgtgcataattttgtttttttattgcagtgttggtggataaacacagtactccattattttcacattcgagttatctatgatttttttactgcagtccttttgtgtggagttcgttattctggaaggtgataacctggcatcaattttcacgagcaccactttcgattggaatgggattcatgccgatggcagacatttctttgggattctatttgctcttgttgtcttacccagcgtgtggttgcgagatcttcgagtaatatcttacctttcaggtctcgctgctctcatccaacttcattttcctcgatctcgtcactgatatgataaactggttgattaacgcacctaattattccttcagtgggtggtgtgtttgcaactcttctggttttcctatctgttggtgtagttggtgctactggcaacgtagggttccacttggcagggaaagcagtgaagtgggatggtataccatttgcaattggcatttatggtttttgctacgctggacactcagtgtttccaaatatctatcagtcaatgtccgatcgcaccaaattcaacaaggcactctacatatggtatgtagataactaagtcaattcgaactgcattctggtgggagtcactcatgtggttcattaatgatttttctcaatgttatgtctaaccgtgttgttcagttttgcaatatgcacgacaatttatggcgctatagctgttattggctacctcatgtttggagataagactctctcacaaataactttgaatcttccgaaagattcatttgtggcaaaagttgcactggggaccacggtaactattattgttggtttctctgattcaattaagtgagaaccctttgtattgattcaattaagtgggaactctcattgtgctatttttttatgtttcaggtgatcattcctttcacaaagtatccttagacatcttagttatcacttctgtaacttgaggtttttaggatagcgtcgtgtttctgaaattgtctgaatcctttaggccttgttcgtttctgtcggatcggtgggtcggaacgaatcctaaccggattgcttctctaatttatataaactttgattgagtggaacgattccgggtgcaatccgacacaaacgaacaaggccttaagggatttcttcatccttaaccacttgcagatattctttggtgataaacccattggctcggagtatagaagagttgcgtccagaagggtttctaaccgatagactcttcgctgttatgctgcgtactgccattgttgcatcaactctatgtgttgcctttctcctgccattctttggtatgtaattgacgcataatgctgaaacgggagtcatgtctgcatatgtagttatcaactactgttatatgtcatacaagattttttgagttttaggacatagcctcagtctttttaactatagccaagaatgttaggcagtgggctaccactaaaaatgcacaggatacctatgcatcttcatgttttttcctggtttattatctatgtataacatgtgactgtgacttgtattgtacattccaggtcttgtgatggctctcattgggtctcttctcagtatacttgtggtatgtcgcttctcttcagtttcactgcttatctggtcatggtagtataatattaaaacaaaatgcatgaaaacaattctgtcaagccaattatagttcttattgaaacaaagctagctagattctaaaacctcgttctacataccatattcatggaaaaaatgaaaacaatgtgataattaactgaataaacacgtttcagcatcatataccaatcaaagcatctgcatgattatctgtcattttcaggcgctcataatgcctgccctgtgcttcctgaagatcgctcggaacaaagcgacgcgcttgcaggtacacacctggcattctcctcaaggacagtacatgtggacaacacatcgctaacgttccaatgtctgactgtttttcactgtgatccgttggcaccaaccaccgcaggtcatcgcaagcgtcgcgaccgtggtgctgggctccgtctgcgcagttcttgggacgtacaactctatcgccaagatagccgaaagctactagctagcaagcgtccaaaggccaagaggtctgccatggcccggccgccgcgcctgcacagggcgccatcgtgccctgtgtctaggcctcccttgtatgaactgcacggctgcaccgtgcatgcagaaacgcgaactgtactctgtctgtccgtggcccgtcccggcctgtacagggtaccatcgtgccctgtcggcctgaaataagagggtacctctgtccgtgactgtgttttctgaagacctgctgtttctgctcgcatttcagtgtatttctgtgtttctgccttggcccaggaccgtgccgtgccaacgggcggcggtcgtcggtactcggttgccgatgcttgccggcgcagtgaggagtcgcggtagtttgggcgtagccggccaatggatggcaccgggttgtttgcctaaaaatactcagctcctagaaatccacagaatttcttgtacttctgacaaacaggatctctatgcctgatagaatcgtagcacgtcaaaggctcaaagcacacccatgtacttgagagcaattagatgttctttcacatatgaaaaatatgaaaacatatatattgacgataccaacttgctactatcaatttcttaggaggatatgtcagtggactaaatttacagaaactattgacaacactgtttgacttctgagagggattatgatatttttattggacggacggagtagtatttttatggacattcagattgaaatcattaagcattattgggactcggttatttgcttcagattgttctgaatttgatcgacggaacttactgatgcagccttttgaagttacggagagaagagacgtgaatcctactgttaaacgatccgccattccgcccggacctcgttgctaaatcaagagccagcgagaaaaagtcgtactacagctgtgacgtcaagaacagagacgagaatatgtactaccgcctcgagcaagacagtcacgggattcggtcagtttagccattgctatcttcagcgagataccacccagctacaagatttcaggcattgaaacctaaactatctgagtggcacataacttatacacttatacatatctagtatttaattgtcttgtgggaattatgaaacaacttactacctctgatctcgaatatttttcattcactaattcattttttggctaaatcgcgataaataaaaaagaacgggagagtatgataatatacattggacagcgatatctacaatagtaacgta

SEQ ID NO: 708 - protein, 528 aa, Zea mays
MAAAEEEEEWEDGRSVMPEEEDGDIEDVPPPPLLGRNFGSEDEDEDEAGSLNSQSQWWPRSFREATDTYTIAAPPGLRHLVVGDCNGLGSDLKLPLLSDKLDGRQDSSNNLLPVADPFGSVLSDGRFSDRVQQAPTTPGCNLTQTVFNGVNVLAGIGIFSAPYTIREAGWASLVVLAFFAVVCCYTGVLLKYCFESKDGVKTFPDIGELAFGRIGRFLISIVLYTELYSFCVEFVILEGDNLASIFTSTTFDWNGIHADGRHFFGILFALVVLPSVWLRDLRVISYLSVGGVFATLLVFLSVGVVGATGNVGFHLAGKAVKWDGIPFAIGIYGFCYAGHSVFPNIYQSMSDRTKFNKALYICFAICTTIYGAIAVIGYLMFGDKTLSQITLNLPKDSFVAKVALGTTVIIPFTKYSLVINPLARSIEELRPEGFLTDRLFAVMLRTAIVASTLCVAFLLPFFGLVMALIGSLLSILVALIMPALCFLKIARNKATRLQVIASVATVVLGSVCAVLGTYNSIAKIAESY

SEQ ID NO: 709 - DNA, 5007 bp, Zea mays
cctctgtgttggctgaaattataattttgattacatctatacaacatatttgtattgtagcttatttccaatactaagcgtatatgatattgggatctaattaaattctatcaccttcaatatctacgtccaaacatatgttaagagatcctatataaggctggctccagcaaggaaccctaaagggttctctaccctaaatatagaggatcaaatggtcttctacgatctccagcagcgtcctctaaacggtcctctaaatttagaggacgctgctgaattctctctatatatagtttctctaaacggtcctctatccatttgaatactttaaataaccggtatagcaaaactaaaatatgtataatacatttgagagtatgacaaatacgtatgtacaaaaaataaaaataaaaaatgtctctaatatagatatttgagtatagaggacgttgttggagaggaaggagatataaaagatataatcttttaaaggagactgtaaagaacgaacatagagaatagatatagagaacgttgctggagacaacctaagaccttggactcatagggtctccggtcgagtcattatcgggattgatctctcatgtacaactctgaaaatgtcatgctgatgctgaactggaccttatatgaatccgtcttctgccaaaaaaaaaaaaatcctgaaaaacgttttactcatgacgttggcagtgtacgcttaaaagacaaaacgttttcacggatcttacatgtaaaaataacaaactgaatctaacgtgcgtaacatggaaagggattactattaagagtaacatgaaaagtgatatttgacgtggcacgcatcacacaggtcgctgcgtacttaattggacaaacatgtttggtgtttaagcaactccgttccggcctttggatcaaaaatccgtcggtaggcggcaggagctgagccctgagtgacaaaccgttgtgacactgacttgtgagcaaggggaagcacattccaattccgccaccgccacttctttcttccccgcggacgcgtcgaaaagcgagcctctggggagactcgaggccactctgccttcccctcctatcctgtgagctgtaacgcttggaggtatgtgaactatccatataagttcctgtgagctgtctcccgctcactcggtccctgtccatccgtagcgttccattccattccatcccatccccggaaagtgcaaggacgggagggagagcggccggcgcgtcacaaataccaccagcccaggggccatggccgccgcgatgaccagcttcgtcgccaagaacccgctgctcgcggccgcggcgcggcgcagggcgcctcccctcgcggggcgcgccctgccgttctctccgctcgccagcaccagggccccgcgccgcaccgtcacgtgcttcgtgccgcaggacacggcggccccggccgctcccgtgccggcgctggacgaggaggccagggccgcggcggcgcggcgcgtcgcggagaaggaggcgcggaagcggtccgagcggcggacgtacctggtggccgccgtgatgtctagcctcggagtcacgtccatggccgtcgccgccgtgtactatcgcttcagctggcaaatggaggtaaataataactctttactgtttgccttttgtagttctctctctcgttgctagtagtgctgccaggagtagagtagtatgtggccaggaggacgtgggcgcgacgcaagtgtgccaggtggttgaagcgcaatgctggacctggactactggaatttgacgcctccgtggtgaactgcagggcggcgaggtgccggtgatcgagacgctgggcacgttcgcgctctccgtcggggcggcggtacgcggcgctcctcgacgtccttttctgacgcgcatgcaagcagatcgattggggcctgctgatttcgctggtcgcgtgcgtgcaggtcgggatggagttctgggcgcggtgggcgcaccgggcgctgtggcacgcctccctgtggcacatgcacgagtcgcaccaccggccgcgcgagggccccttcgagctcaacgacgtgttcgccatcgtcaacgccgcgccggccatctccctcctcgcctacggcttcttccaccgcggcatcgtgcccggcctctgcttcggcgcggtaagctagctagctagccacggactgtgcctggttagtttagttagttggttggtcggatgacccacctctctcagcggtggtgcctgcctgcctgtcagccacgggggatccgactgtgatctcaccctccacgtgtcttcatgtcacagggcctggggattacgctgttcggcatggcctacatgttcgtccacgacggcctggtccaccgccgctttccggtcggccccatcgccgacgtgccctacttccgccgagtggctgcctcgcacaaggtacatagtacttacgacggcgacgaggccagccacctctcgctcaccgaaacttctgtagcgtgcatctactgtactgtgcctgcaactgggcaggcagtaccgacctgagctgacatgtttttctttcttttcaccgcccttttgcgcgctggctggtgtggcgtggctgggctcctcggcgatgtcgcgagcagatacaccacatggacaagttcggcggcgtcccgtatgggctcttcctgggaccaaaggtgcgcgagtggtgtggcccttcttcttttgtcctcgcattgcctgtgaatccgcgatcctctgcgactgacgtctgtggctgtggctgtggtttcaggagctggaggaggttggtggcctggacgagcttgttagcagtccggtgagtgaagctactgatactgaagacgcaggagaagaaaagacgcgtccagttgtatgcgttgtccgaacaagcgtgttcatgggccagagtgtgccaaatgagttctagctttaggcgagtgggccaaatgagtgtgggctgcgtcccagggtagtataagtactatgagtctgtaataatcaggacaagaagaatttaggtaaagtaatacatctatcgccatcttcctttcattctctcctacacgctactctcttctctgatcttctctccctcgaatcccagtagcatccagtagctaacatctggtatcactggccatctttttactgttatgcagcttgggtgtggtggattaaatcactggccgtgaatggacccatcctgcaatattcaagtcgtgcttaagaaaaggatgtcatgcttctggttgatcttgaaaagaatatcattgcaggagcagacttgagtgatttagccgtggagcattctttttgtccatctaaagaaaatggtggtcaagacggtactaaccttctcttgatttgcaactcatggctcacgagtgtcaatagcctgctcttggctaacgagaaggccagtgctgttgatgatattggctacggtcttgacaaaagggcaccagttcagtattactcacacaatctttgctcatttcacaccaggtcatcttctcagattgggagacatagcttctaaaggtacccaaccaacaactcaaggctgctgagtttctcctgtaaggccagcatcagtactgcccttgtctctcactcacccaaactatggggtaatcagtgctaatccctgaaagctgaagtagagtcatcaatcattgtctacactatcagcggcttgggggcaagccgcatttcaagcggtggggaatgttagcagtccggtgagtgaagctactgatactgaagacgcaggagaagaaaagacgcgtccagttgtatgcgttgtccgaacaagcgtgttcatgggccagagtgtgccaaatgagttctagctttaggcgagtgggccaaatgagtgtgggctgcgtcccagggtagtataagtactatgagtctgtaataatcaggacaagaagaatttaggtaaagtaatacatctatcgccatcttcctttcattctctcctacacgctactctcttctctgatcttctctccctcgaatcccagtagcatccagtagctaacagagctggaaaaggagctcgcgcgaaccagaagggccatctgatggattcgtacatggagctggaggaggttgtgagtccggcgcggcgagctcctccgcgcgctccgtggtttttgttttttgttttggtcgcttttttgttgatttcattgtcttgtttggtactggagggttggcgaatcgattttggatgcactggcgtagatgttggctgtccacttgccctgcatttcgaatggtctgggaaggcacggttcgtacatggaaaatgtcctggaattactgttgttttgtttgctgccgtcgtcacgtcggcgtctccgtggaggcgtcgcacgttctggtcccctgtattgctgttcttatcgctaggattctgtgtataacttgtacagacacgttatggatatgaaaccaccccaatgaagctaaattgggtggttggaaacagcgctgaaaattcagaaactccctgcatgctttcacattcagaagcgctggcgtgatatagagggttttcattcccacaaccccatagtacatgtctagtggagaagtatacgcttcataggctccacaaactgtatactactaagtctactggagatgtacatttctttattgccgtatatatggcgggctaattaaaatcttaataatgatctgagtggcttatttaatcaatgtaatattatcctaccgaacatcctagaaataacatacctactacacaagttccattgctagtcataatctataaaatgcaggtaatctctacatattcataaaaggcatataagcgtgacttatagtcttatatgtttcaaaccgagtggatggtttgattggatcggaggctttgatttgtgtcttagaatgttgcactttgctcttgtattgaatgcactgttgtgaaagcatggatggct

SEQ ID NO: 710 - protein, 319 aa, Zea mays
MAAAMTSFVAKNPLLAAAARRRAPPLAGRALPFSPLASTRAPRRTVTCFVPQDTAAPAAPVPALDEEARAAAARRVAEKEARKRSERRTYLVAAVMSSLGVTSMAVAAVYYRFSWQMEGGEVPVIETLGTFALSVGAAVGMEFWARWAHRALWHASLWHMHESHHRPREGPFELNDVFAIVNAAPAISLLAYGFFHRGIVPGLCFGAGLGITLFGMAYMFVHDGLVHRRFPVGPIADVPYFRRVAASHKIHHMDKFGGVPYGLFLGPKELEEVGGLDELVSSPVSEATDTEDAGEEKTRPVVCVVRTSVFMGQSVPNEF

SEQ ID NO: 711 - DNA, 3253 bp, Zea mays; identical to SEQ ID NO: 607

SEQ ID NO: 712 - protein, 241 aa, Zea mays; identical to SEQ ID NO: 608

SEQ ID NO: 713 - DNA, 4819 bp, Zea mays
aaaaaaagaaaacgaaacaaaaagatagcagaaacgataggccaaaaagtcaactatggaagctggtccacgcatacgtaaaccatgggtacgttgcagctactacgtacgtatactattgcttaagagttaagaggttggagagtaatgatgatgtgtaactgctgtacgtagcaatcccttcgcctttttggccccatccaatcaacgtcgtgggactagccatctcaatgcaggctgtagacacactatccgaatctggttcttttctgattattttttagttttttttaccgagtatgatggataaaaagtactcagtaaaaaaatcgttgctggtacaacattttttttgcgagtgttatatttagcaaagtcttcgttgaatgtttttcaggttttacggattgcttcagacactcgacaaaacaacagttttcggtaatgatagagtttaaaatataaaaaatagaaatgagtgatctgatgaagaagatagcccgacatcctatcctactcgagtgcagcaaagatcgattatacgtagccgtatcatccaccagatttacacgacacacatacgcggcgaagcttcgccgagacaacatgatcagagaagtaattaaacagatatataatagagtagaaggaataaataaacaaaaaaaggggggtgggaaccgagagaagaggaaaagcgagatcaaaaggtagctagcgagcggtccacatttcgtccctgggctgggtccagcacgttagcgatatatagagaggtcagttacagaggaggagacgccacagctacagagtcagaaagaaatgcctgtggctgtggacttgtggtggacgcggacggacctggtggtgtcatgtgttgtgtgcagcgactcgacagagagaggcggcgctgtagaaagaaagggtcttgtgtgctgcgtcctccctctatttaagggggcccttgggcgccctgttttcttcctcccgcccgatacatttctcgtacatcgctctcgctctcgctctctctcctgctgtccacgaccgaccaaaggcgccgggcacagactcttcgtcggatccaagagaagctcgcgccctccccgaccatggtctcggcggataccatccgtacggctatcggcgtcatcggtgagtcccctggtcgtccatttcattattgttgtcaactttgacgaacagcatacgccgtacgcatgcatgacgagcatatcctccggccgatcacgcgcggtggcgcctgctgttttacatgtcttttttttttgttccacgttctcctcctcagtttgctgttttactatcaccgttgattttttaaatttttttaactattcctcttgtttaaaaaataatgagttatcatattttttatttattttattatttaaggtaatttgttcttaacttaaaattttacatttttgaattaatattttaaataagacgagttatcaatgtttcgaaaaaaatcaacggtgtcatatttttttttttgtaaaatggagtaagctagcttatatgtacatcattaacttaattgcgttggtgttgctgcaggcaatggcaccgcccttgtgctcttcctctccccggtgtaagaatttatcgattctgcttctgcttgttattttttatctacaaatcaaaataataaaaaaataataaaaactagtactacgcaatccagctttctccttataaagaaatcaatggataaatttaaaaaaagcagagcatcaaaccaagaagaaaaactgatgtcacgaacttgacagttgacttttcgcgcaaacaaacaaacaaacactacgtactgtgctctgcttatggatacatacatgcatactagtagctcatatatgcgtacaaatgcgccccgcaggcccaccttcgtgggcatctggaagaagcgtgcggtggagcagtactcgccgatcccgtacgtggcgacgctgctgaactgcatgatgtgggtgctgtacgggctgccgctggtgcacccgcacagcatgctggtggtgaccatcaacggcaccggcatgctcatccagctgacctacgtggcgctcttcatcctctgctccgcgggggcggtgcgccgcagggtcgtgctcctgttcgccgccgaggtcgccttcgtcgtcgccttggccgcgctggtgctcaccctggcgcacacgcacgagcgcaggtccatgctcgtcggcatcgtctccgtcttcttcggcaccggcatgtacgctgcgccgctctcggtcatggtacgtacgttgttttcacatacatgtcgttgattctttctctctatgatatgacacgaaggtaatgtttgtttgttttcttacttacttacttacttggtgtctctgatctgctgtgtgtgtctctttttttgtatatggttgatcagaaattggtgatccagacaaagagcgtggaatacatgcccctgttcctgtccctggcctccctcgccaacagcatctgctggaccgcctacgcgctcatccgcttcgacctctacatcaccgtaagcgactattactagtataacgtgtgtgttggataaattttacattcatttttgtttaaacacctagtatgcattcgaactaccccgagccgctgtagctactactacatcatcagtgggaatctggcagtaacaagtcagggcatgcatgcttcagttagcaggtggcaaccgtagtaaacgagagagaccagtcttttagtaatacatgtagtgtgcttgggcgttggggtcgtcgtcggttgatacttgatagcaacgtcgccatcggagaacaacgtaactgaacagtgccaatcattcccattcgccctagcgagagctagcccctgcagccacctctagtccaagtccaactacacctacgacacaagccgtgttggatgcatgcacttgatgacatgacgactccaccgtccaccattctctatccggccggtctggacgtacagggtgccggctccgttctggcgccgtcgcgttggcgtccgcccgcagctacctggtgtggtggtcgatactcccaatgccggcagcagcagcgccatcagcttggattcatcaaatgcatttgcatacgtacaccagtacaaatatatcccttgggtcatcagctatcagcaggctagctaccagcagtacacttgtactcggcggccaattacagctggttcttggatcctagctagctatacagcctcagctctgctgttttctttctttctttctttctttctttctttctaaacgtacgtacgtataatgatcgtcaacgatatgatctcgcatatgcagatccccaacgggctgggcgtgctgttcgcgctgggtcagctgggcctgtacgccatgttctacaagaacaccaagcagatcatggaggcacgcaggcgcaaggccgaccagcagtcaaccatgatggaggtggtcaccgacgcctccgccacgccgcccccgccacccaacaacaacaacggcggcggcggcggcaacggctactgatcgcatgcaacaggaaggacgacgacgatcgaccagcaagcaaaagccacatacatagcgtcgtcgtagcgccccgccgcccaccgaatgcttgttgttccgattccgatctccccaaggggacgatgctccgttgcattctctgcatatcctactaatataacgaaacgaaacaaaacaaaagacagcacaaaagggcttgctgggtttcacatttaccatatataatcgtctgctgctgtcttgttgctggtatcactgctattggaaacccttcttgcttgttctctcttcattccgcccgccgcgtaggcgtagctagctgatcgatcgattttcacgtcatttattgctcggccttcttttaattttccagtttctgtatatactccctttcattttcaggatgctcagttgtaggtgaggtagtagtaagcgtttggatttttttctagtagatgaatagaaggaaacaatacccctcatctctatgctcctcgtcaccaacagcaaaaatgctatttccagttagcaacatctaaacttgtatctacaacacttgaattagttcctagactgtctcatctgaagtaacttcacaaatttcgattattttgttactctccaaaattagaacatgatagccacgtgaatgtacagggaaaagaattccaaaaacaataccatcagttgatctagattcaaatttatctttctagattttagcacagatcagtatttgcatccaaacgcacatggatgaaaaatggactatgtcttatttcattataatagtggctttagtatttgataaactttgggcttactttggtcctccaatatctcccccgttgaaatcaaatgacaaaaagaaaaaaaaaagattttaagcacatagaaaaggtcaaaaacttgtggtccttcaaaagaatttctcctttagagaaagtcctcccatttggtgaagtaatctccactaataaaaaagatatacttctctgtcgaaaaactctcctcctttttaaacaattctctacctttggaaagaattttttttcctttttttagaaaaaataaattttaaaacatgagaagatcacaaaagattttttactttattatatagactaaactcctcatgtacgcacacatatttatatgataaaagttaatctatgaatactaataagaatggaaaccatatgcatattcataagggggcaaataatatctaataattaattatagtctatataa

SEQ ID NO: 714 - protein, 261 aa, Zea mays
MVSADTIRTAIGVIGNGTALVLFLSPVPTFVGIWKKRAVEQYSPIPYVATLLNCMMWVLYGLPLVHPHSMLVVTINGTGMLIQLTYVALFILCSAGAVRRRVVLLFAAEVAFVVALAALVLTLAHTHERRSMLVGIVSVFFGTGMYAAPLSVMKLVIQTKSVEYMPLFLSLASLANSICWTAYALIRFDLYITIPNGLGVLFALGQLGLYAMFYKNTKQIMEARRRKADQQSTMMEVVTDASATPPPPPNNNNGGGGGNGY

SEQ ID NO: 715 - DNA, 9924 bp, Zea mays
aattagggttttctagggttctttttagagttttgagcactctaggatttttgtgccactcaaatccatcaaacttgataccttatgaatatttctaatgacttttgaggtattactcattttggcttcacctttatccatatgccctaatcccagggttgagtaccctaccctagagttaggaatactccaagtcactacatcccacttgttttgaagttttacctagtggatgcattctaggtgttacaaacaaaatgaaatgtcagtgcatatgatgccatgctcaagttttagtgccagtaacaccaggggtgttacaaaattttataccccaaattcagggtgttacagttctttaagattaaaatatcagacatagaatcatagtcgtctattgttcgagtagattgagcgtgagagagattgtttctccggatcgtaagcacatgcacatcaatgtgacaaactgacaagttcaagcgctcctagagcctgtttggttctatacctaagttgccaacaattgccacatttttatgacacacttttctaatgtgtctaaggttatgcgctcaaattctacgtcacaatttatcacatctaagggaatcttaccatacttttacaagtagttgacaagtgagacccaggcaggaggcgtaaaatcttgtcacaatggtggctctaaaccaaatatatgtctaatttaattaaacttatctaatcttagacgtgataaattgtcataaatgatacaatcctggcctttctgctaggagaaaaaaaacctgatggctagtttgaaaacccaaatcatcttcaggatttaatgagattagaaaggaaattagtttatttctaacctagtttctttcaatcccaaagggtatttgatgttaccaaagtaaccttgaggagaatcctgagtcccggtcctggtcccgcagccgttttggacttgtctcgtggtgtccgcgtgcacccctctcccttccttggtttcgtggcccgttaccccaccctgcttcctctccgtgggcacctgacgccgcgaccccggccccgagctggctttgccggccaatcggctcgcccgcgccgaccaccgcgcctcttcccctcgccgagatcgcctgaaaaggcaagcgaggccagcccgatccccctccccgcccccctcaagaaccaaaaaagggtgtcatttcgtcctaggatcgcagctcgagctcggtcgctctcgctcacctcgctccctactcgcctgctttccacttcctccgcgctcccgatttcctctccgattccttcgccgactcgtttcttcttggcaattcgttgcgcgggccatcgccccgacggcacctgggtacatcagctacaggacgggacaggtccctcttctaggagaggcttcgccagccgcctcccgcccccgtcactacgggcgccgtggagcggagatccatccggacttggatcggtctcgtcgcgtggtaagcatgtccagcgtgcttggatggattctagagtctatacagtagtgattggagttatcaatcaaatcctttttctcgcttcggttcagttcagttgcggatttgtccgcgtggttccgtactaatctaatccaaatgcactgttagagtaggttatctatttgtacgataaataatctgttgacacttacacgattgaacttggcacccaagtgctggtgcagtttgtttcctggggttcaattgtatccattctgatctcacccttcattttgcgtttcccaacattttggcattaatttcagattacagctcttgttttattgccagtttgagcaatatgggttggctgaccaagttttttagaggctcaacccacaatatctcggaagagcagtatcacagcaggcctgcagaagacacagcatggaatgaaccctctagctctcctgttgtgactgtaagaatatgccatgcgctactgttaacattttatgtttttgaacaatgctgtgtactggagttcctcgtacatccctacactctagttcaggataaaaggatgcaattctgtttatctagcttaggcaaaggagatgcagttggtgtgagctccaagaaaacttgtcctgttcttgttattgagaaaaacgaaagttctgatgtatacaatggatataatttttctacccaagttacttgaaaggacggtttttattttactccaattgctataaatatataccactatgtcttgtccattaaaattctccttatatggatactaatgttcgcaatgttttgatattggtcacatgaaaacaactttttttgttattgcttgtggtggttatggcaacattgatacttcaatcgctatgtacatatacaccagccaatttctgggcaactagccaactataagcttctaataaggttttagatggctccaagctaccaattgcttcaaaaataccatatgccgttgttataagcttttaagtaataagttgattatcttactgatcacatatcggcatgcaatgtaggacatcctttcagagtttaacaatgaggatattgaccgtgctatagcgctctctctatcggaagaggagcaaagaaaggaaaaggcaataggttggtatgctttcttattaatttatgctgcgacattcatccaggttcacttatgttgcctgtgatatgacattgtcaaggtacttcgtgttttagagaagcacctatgtctcatattaactggtacttaaaatgccctttgaagccaatccacagcatatgatgatagtatgatcatcgaaaatctttgttctaggatagttaacttattgctgttcattgtttttgatcttgtctaattttgatcaagaaagccgttccttttccatctttaagtggaaatagttcattctagatttctatggatttcttaggtaaatggaaacataagattacaaaaggatctactcataaggaaaccaggagttatcttatagttaattgtttcttactgcatccttgcttctatattcttttaaagacggattcaagaatgttttcttcaatttctgtggttaaatgtaacaattactaactaaatattcttatggacttcaaccaagaccatgtaagaaaagtgcatccctgaattgagcattagtgtgttacatagtagtgtattgtgttcaaaattttctctaagactattgttactcagtttacttcatgtctttagtgctgttagttttcttatgaattcatgcagttaatgtgtgacactttctggtttaatttgtttttacttctagataaggatatgcatttggaggaggatgagcaacttgcaagagctatccaggaaagtttgaatgttgagtcaccccctcgcagaaatggcagtgccaatggtggtactatgtatcatccgcctcgcgaaactggcaatgcatatcagccacctcgtgaaaatggcagtgccaatggtggaaatgcatatcacccattaccatttatgttctcatctggattcaggttcatttcaatttggttactaagtttactattatagttttgtgcaatttgagttgatggttatgaaatagtaaataagcatataactgaactaatatttttgtttccagaaaggaagtacaccactcatggaccatacatgctgcacatgttactgctaaaaaaacagcaaatcttatttttgtactattcccaccaaaagcgcctgaatattgatttatgtaattcattccctgaataccactatttgtttattggcttcacgcgaaagggcctctagatgagttggttaagtggcctgagcaccactcctcaggtcctgagttcaaatcctagtgggagcgaatttcagactgaggttaaaaaatgtcactcgctggttcccctggttgcgtgcacacgagatgaattgacctaagagctttcctgatctttctcggtcggggctccgattgagcatcttcttaatataatatcgtgggggcggtcttttccgtactggccgagtttaatggcttcacaaacactgctagtcacaacgatataatgagcctgtttggttcaacttttttctgacgagcttttctaagacctagttgtggggagtctgagtatcgtgaggattacatacagaggaagataaaagggtccatagggtttaggatctagaaagagtcgaattcctcctatcacgactacttggccaattctgtgttcacgttgatttagacaattttcaccaaagtgattctcatagaagcatgctgaaaagctggcgttatgcagtctgcatcaggcatcagcttctgttggctagaatctggttttaagctgaaacaaacggagcaattatgtcttgagtgagaactcgtcccagcagacttttgaatgggtgcggttatttcgtgttaacaaaactacctaggactttataattattttgttacgaaaatatctgtagaaattagagccgaagaggaatcaaactgtacactccacctcccaccaactgagctatgcatttcttcgttgcaaggaacagagaaaaaacgaatataggtgtctccacttttcaacaactcatgtaaagttctggccttgttttctcccactaaccaattacgttataaccacagaacaaacttggttgtcctatcaggaaaattccagctgagtttgcttatgtagtaaagaagctaaacgcatgatggcataattatttagaaaaaaaatcccacgctgctttaggtatacaactgaatttttttatctgatttgtgtagtgtgcccgttattatgccaagttcagtttccttatcttttccccagtcttcaggaaaactgttacaaactgtggtgaaatttatagctcagatgtagaatgaaagcaaatattttaaagtggacggggcttgtggttatgcgataccttatatgtaaaaggatgaagcatgtcctcaaggatgttgtttccttaaatagaagtgccttggacatgtgaaatttccaatgctatcaaaagattaagaaattgtacatatgtgaattttcaaatgctgtcaaataaacaagaaattgtgtatgatttttcacatcgattgtagtaataaagacgctgtaatgctcaagaacacaccaggatgattggcatggaagatatcattttgaccttttttctcttactatttttttatataaactaacttcttttctgcagagcatgcgcaggatgtcacagagagattggtcacgggcgttttctcagttgcatgggagctgtttggcatccggaatgttttcgttgccatgcatgtagtcaacctatatatgactatgaggtaacttttttgtttactttttagcagtttctttcaatgtactgaccttaaagccatgctgcagttctccatgtccgggaatcatccataccataaaacttgctacaaggagcagtttcacccgaaatgtgatgtctgcaagcagttcgtaaggatcactttatttaccctgaccgatctgtttatgctataagttttttctgttgaacattttacttgcctgtttgtgctaataaaatctatctccaatatcttggagaatgtgctttctctacatttttcatgattgacatgtttactcttgctaatatctgattacttcttttcagattcctacaaatatgaatggccttattgaatatagggcacatcctttctgggtacaaaaatactgtccttcacatgaaatggatggtactccgaggtgctgtagttgtgaaagaatggaggtaggccagttagcatgtttttcttaatttggtcttgtgggcatatttcatggttagaagagagcctctgtgtgtgaaatttggatcatttcattccaacatggtttgttcacttaccagccaagggaatcaaaatatgtattactggatgatggtcgtaagctctgcctggagtgccttgattccgcagtgatggatacaaacgactgccagcctttgtatcttgaaattcaggaattttacgaaggactgaatatgaaagtggaacagcaggttcctctgcttctggtcgagcgacaagctttgaatgaagccatggaaggagagaaggctgtatgtttactatgctcaaaacccaaaatttctttttctaccccactgtactgttagctgtagctattttgtttcttttggataccagggtcaccaccatcttcctgaaacaagaggactatgcttatcagaagaacagactgttagcacggtgagagtttttccaaacaccaattggattattctttccttatttaattcttgttctgttccaattttgttcttctgctgcattctgaatgagactgatgttttcagatactgagaccaagaatggctggaaacaaaattatgggaatgataacagagccatataggctgacacggcgatgtgaagtgactgcaattcttattctgtatggtctcccaaggtgaaatgtcaaccttttgttttgtataatgtcataatcagtacctcctgaccgagacaatctgctgccccagctttaatctctacgtgcacttttgccctctttcttttcactatttgccattgcccctgctttggccaagtcaacacacagttgcccctggttttgccacttttttgcaatgaaagtaggcaaaaccatagggatcagtgtgtttgagttggttaaaaaaaactcagtgggagagaaagagtgggagagaaagactgccctcacggtattatattaagaagagaccgaaatatggtcacgcccgagaaaatccctgaaccctggcttcccatcactagcgggccgtcactgcccactctgcaacgccccagccggagggtggcgcgcaggctgtaacctgggagcgggcggggcacaacgaggaaattttttttaaccaagctagaaattcgctcccaagggggattgaacccaggacctggaggtgctactcggaagccttaaccattacgctggaggcagcaagggcaatggtgcagagttaaagaaaaggggcacgcgtgcagtttagaggtcagagttgaagaaaatgggacaactaggtcagcaaagtggtttctttcagtctcttcagatgttttttccttctttgtgccctccaaaaagttgcatgagaaccgagctagtgcttaggtcgataagcaaggtgggctatgatgggtgtgtgtaggggtggtaatgggctctatgttttagattataaaatttaaggatcggatcattattaggatcggactctatttttattcatttttgaactaaaaattaattaagagattaaacaaatcgtgaagaaacatttgagttgtgatccattaccacccttaggtgtgtgtgagtagcgtgtgtgtgtgttcacatatgaaccaatgctacagctgtacccagatgcgaggcttcaaaaaaaagttgcatggaattggagatgtctggagtatgaactgactgcagacttcacgaggaaaatagtttactgttgtccatcgtcacaaatatcttctcctataccatgttgttttgtttggttctacattgttgaatcattaaggatgctcaaatttgtttgtatagacttttatggtgttttgttcttgcagattgttgacaggttcaattttagctcatgagatgatgcatgcatggttgcggcttaaaggtgatacctagttcttgtgttcttcctcggcccaaaataagggagacctatttagatctgacacagcaactaagggtgtgtttggttgtgggacagctaggacgggatcgtcccctgacgtcctctctcgtccctccaattttgagggacaacagtcaacaggggacaacacaggatagtactgtcccaacccttgacccagaaccaaacaacctaatttgagggatcgtcccgtcccatcccgtcctgtcattgcaaccaaacgcaccctaaactaatgttttagttctaggctagcaaggacattaaattgttttcaagactgaacaagtttttattagccaattctagtgaactggtggggctgccatgtaaattgttagaactcagttttggtgtcacagataattactaactagaaataagaacacaaccaatgctaatttgtcggtgaagaaaatcttgcattcatttggcaattgccataataatttgcgtacacatcctatctacttgaaactgttacaaggacatttctgctaatgaatatgtcatcacaggataccggacactgagcccagacgtagaagagggcatttgccaagttcttgctcacatgtggatcgagtcagagatcatggccggatcaggcagtagtgccgcatcgtcatcctcaggatcttcgtcatccacatcatcgaaaaagggcgggcggtcccagtttgagcacaggcttggggactttttcaagcatcagatcgagacggatacttccatggcctacggagatggtttcagaactgggaatcgagccgttcttcattacggcttgaagcgcacccttgagcatatccggctaactgggacctttccattttgaagtagcatggattcatattttgggaaagcttatattatatacatgattttcttccagagttccattacaaccaaagagataaattgtaaaaaaacattctttccagaatccagagatataatatctatgaaggccaaaatgaagtattaaatgattgagatcgatggtcagtctgcccaatcattttgtattctgatcaaactctggaatgaaacaatggcaatctttttatatggtgtcagtttcaataaataccagtaccattttacagtatatatacagttgctttcatgtgtgagcttatctcaaactacttcgtccgttccaaattataaggtgttttaggttgtgtttgttttccttttagattatataagttggattatagtcaaagtgtaggaggataaatatatcaatttgagatcacaaattgtaacacacaaaatcctaattttgggatttaaaaattaaaaaaatattatcctgaaatctaaataagagtattttcttataaaagattaaagtaaaagtatctcataaaagatattatatattagaaagtatttcctcgtaaaacaaaataagtagtaaatattgaagtttttgaatgaacttttaatttgactacatattcaaaatactttcgcagaatgaatatgatgtgtgttgcatattgaacattacctaaataaataaggtaataaataaatgaataaacttaagacatatattttgcatttatgttggagatttttttgtgcaaattagaattctatttgaatttaaacctaattggaattggaaaatatgaaataaaaaggaaaatcactcaccggccgaaacacctgtactcgtggcccacctccattccatactacaggcccagcctactgctcacggtggccgagcgctagcatgcacactgttgttatgtggggtcaccccgccagccaccttactcgcgctcatctccctctactcgctgacgcaagggccccaccagccagaagtttctccttcaccatagcaagcgcgagcagaaccgtacccgccggataagtaacgaactccaccaaacgcgcaacagacccaacaaccagtgcggtcgtgccaaaaaatatacaagagccgatgacccccctttcaatccccagctctcagaacccgtgttcgccaccagatcctcgcgccgctcgccgcctggccatggcttgtcttcaaactatggtcatgccgtggggcacaaagacgggaggtcgagatgtgaggggcgg

SEQ ID NO: 716 - protein, 508 aa, Zea mays
MGWLTKFFRGSTHNISEEQYHSRPAEDTAWNEPSSSPVVTDILSEFNNEDIDRAIALSLSEEEQRKEKAIDKDMHLEEDEQLARAIQESLNVESPPRRNGSANGGTMYHPPRETGNAYQPPRENGSANGGNAYHPLPFMFSSGFRACAGCHREIGHGRFLSCMGAVWHPECFRCHACSQPIYDYEFSMSGNHPYHKTCYKEQFHPKCDVCKQFIPTNMNGLIEYRAHPFWVQKYCPSHEMDGTPRCCSCERMEPRESKYVLLDDGRKLCLECLDSAVMDTNDCQPLYLEIQEFYEGLNMKVEQQVPLLLVERQALNEAMEGEKAGHHHLPETRGLCLSEEQTVSTILRPRMAGNKIMGMITEPYRLTRRCEVTAILILYGLPRLLTGSILAHEMMHAWLRLKGYRTLSPDVEEGICQVLAHMWIESEIMAGSGSSAASSSSGSSSSTSSKKGGRSQFEHRLGDFFKHQIETDTSMAYGDGFRTGNRAVLHYGLKRTLEHIRLTGTFPF

SEQ ID NO: 717 - DNA, 7631 bp, Zea mays
taaaattgtaatattttttgagctatttatggtcaacaataacttaagagaggttaaatgacttgacgattctatatatcgaaaaaagttgttggataaaattgatctcaatgatataagcaatgactttgtatcacaaaattttgtatcacaaaatgttagaagatatttttaatgatatcagacgagaagtaagtgtttttgactatattttacatttgttatcttataaacatcaaaacagtgtataataatttttatacgtcaaatattcgatattgtatgtataattatatatatttgtgtgtggatagaccctctatatcgaatttcgcactgggcccctgaaaagtcaggaacggccctagctatagctaactattaggtgttgtttggtttacgagacctaatgtaaatggtaacggtaatggttcccgtttgagtatagacggtaataagtttaataagtcggtatcagtttttaatgtggtatccgattacgtttgcacttaagcaaacataatttaatattatcggttacccttcacgttacaaatatgtgaaccagacaacaccttaattatgactgtttcgaatctttcactaatatgttggttaaactactagttttctgccatacccctgcaacgagtaagtgaagactgtgttaaagaataaggggcattgttgtcttctgccaagttctagctgctccgatttagctgtgctgtttaaaacatctgcagctaattttaactgctaatagttatcttaggttcgaaataccggtatatgcgtaatcaaaactcactatttttatagtaaaggttcatatactgcatttttataatgaacttaatattttctatattcttaattagaacagtggatggaccatttttgcaagtaccacaggtacgtagaagtggcctccaaaaatgctttgactattcaactaattttttcaggccaccagtccaccaggggtccacggcgcgccattagcgaaccgcgacctattcgccgtcgccaatcgccaatcgccaatctcctctccatctcgacatccgcagggcgttcgacgaaatgcgacgcaaacgccttgcggcgcgcgcccatgtggccaggcgtctcccccccgcacgctcctcctcatccggcctcgcgagcgcgcgagggagacgtcgctgtgccagcgcgaggcggacgtcacctcacctccccgccccgcgtagcttttctgacccggatgctacgctgcgtctccactactccgcctcccgccctgccgtccatgtcacgcctcggctccttcctttcgcctcccgactcctgcctgctgccccttgtcctcttccccacctcctccggaatctggccgcgcacctactcgtcgccctctcgttttcccgtctccgctttctttatcctgcgggcggagcgggtagggtggggcggtcgttgctctcggatcaagagaaagggaggaaaaaaaaacagcgctttctttctgtggccggcggttcgcccgtcgctcactggctgaagcggctgcacccgcgccctcttgctgtgtggccactggccaagcgggacacggaactcgagctccgtttggggattccggatcacttcgaggtgagcagctttgctgagttgtgaagcttttcatggtgtcttgggatttggcttagtggtgtggtactctgggtaatcgctcgggctcggaggatagggtcatcaccaatgattcggcttgtttggatagaacgccgagtccctttgttgactgaatttgtaatcaggagcccaaggattagtatccatgttgcttcgtcttgttcgtgtgaggtcaattctgagctgttcccctttgtaccgtcagctcagtaccttgtttttattgtgctctctgctctctcaccactgtactaggcgtgtctttcatgttgacaacatactgggttcacaggaatttttggcacttttatgttttgtccctcggctcttcctaaggtaagggattaaaaaggtatctttttttccaggtcacgaggtgtatgccctttgctaatactgtagtacagaaacggtgcctactgctcagtgatgaatgagatcttttcaatttgtcactgcaaaggtttctccaatttcttctggattcattctgttcttggttgcaggctaaagggattctgatcatcacttaagctcaagatcatgagttggttaaacaaaatttttaagggttcagtaaacagagtttcaaggggtcactatgatggagactggcatgaaggtcattcatctgatcacaccagagtatgtgctctgctgttgaacaaaatctaccacgtgcattccttttctactgcagctggtcatatctgttcgtataacctatgcctaaacaactaagctttaatcttacaccttttattctatagaatgcactatcctgagacaaaagaaatggcattcaatgttgcttgttctcattactgtaggatacttacgatgacagtgataatgaagatatagatcgtgccattgcattatcgctagctgaggaagatcataataagggaaagtcggtggctattggttagtgtttgcccagctattcatatcctgttacctctttgtttatgccatcattgttgaccatcttgtcccatatgatagaattcatctccttgggaacagtagctttgtaaatgaaattgatctagactacaccattgctgaattttaatgtagatactgactataatctggaggaagatgaacaacttgcacgggctctgcaggaaagcctgaatgcagagtctcctcctcgacagaatgttcctattgaggatgtgccagtgcctcaatggaatattcctgttgagcgggtgcctcctcgacagtatgttccagcaaatgaaccaaccccacatgtttacccacggggtggatccaggtacttattttttgcgctgatttatttgatattttagttgtgaaaatcatagaaatctccttctgtttcgtttccatattataaaaatggccaacattgatttgaccagaagtcctgttatgtgtataggatttgtgctggatgccaaaacccaattggccatggacgtttccttagttgtatggattcagtttggcatcctcaatgcttcagatgttttgcttgcaacaaacccatatcagagtatgaggtataagagagtgtcagagtagtatttttccatttactgttcatcgaattgatcaaccgattcatgataatgcatctttgtgcagtttgctatgcatgatgatcagccataccacaaatcctgctacaaagagttttttcatccgaaatgcgatgtttgcaacaactttgtaagtgccgacaatccaagtttatggatacgcatgaaggtattgatcagaatatatttctgatccgtctgtataactgcaattattatgtcttcttccccagattccaacaaatagagatggcctcattgaataccgagcacatcctttctggatgcagaagtactgtccttcccatgaagatgatggcactcctcggtgctgcagttgtgaacgaatggaggtcagtaaaagttttctatatctgtcaatgagtcctgtttccctgttcaattcctgattggaagccgctcagttatggttattacggcaccacgacgagccgagtcgccagccgggcacctgaacgcctaggcgaccatttattcagcagcaagtatgcaatatataccatatgatatataaaaaactagcaaataaaatatagctccaccaagtagcatgcaactatatatgtctgggaggttgccgcgcaggcgtgcagcatgggggtgggcggccggtgccggtgcgggcggcctggcggctggcggcgctagtgacggcggtagcaggggaaagaaagaaaagaaaacaagtacttctactacagtacataggcgacggcgcgtaagggtgataatgagctctaaattttatactataaaatttaaggatcggatcggatatgatcatgctctatttctatttctattcatttttaactaaaattaattaagagcccaaacaaattgtgaagaaacatttggatcgtgatccattaccacccctaatagcgtggcgtaacttggagcctgcctagtcgttgtggcatcgtctaagtcgaccaggtgcccacctaactgggtccaggcgacacgatgtgatagaccatggcgttcgttgccgagcgcctggatgcctagtcggcgcttaggcagcattgtgacaacactgcggtcagttttgactaacattttgaaaatacagctgatttgcttggaatcagtatatattactatgcgtaagagctggatagattgagtagctacatcatttagttcctatgctcttcatttttttttgctacaactctcagctgtggccgttttctgctcactgagtcacgaggtcgcgggttcgaagcagcctctccgcatttacggaggaaggcttgtgtcggtttatcccttccctagaccccacacatgtcggagcccatggcactggatctgcctttctcagctgcgaccattgcacttcagtactagttttaggatgccagcaacacagccaaattgtggtattggccaatgtcactgcatggatattttagaactgttggagccagcatatagcccagcctacaaacgtagcacctcccagttaaccgttttgcacaaatgatgacaaagttgtaagcagggtactcttcctaagcccacgcaatatgtgggagtggcaatacacgtttttttttttgcaattaacttttgtgcctttattggttctttcatttcttctgcaattattccttttcgactgtgctctttctatgacgttacaagctgccctgtgcgtctatcttcttatactccttccatcctgaaatcagccaagggagatcaagtacataacattagatgatgggaggaaactctgcttggaatgtctcaattctgcagtaatggattctccagaatgtcaacatctttacatggatattcaggaattttttgaaggtttgaacatgaaagtagaacagcaaattccattacttttggttgagaggcaggctcttaatgaagccttggaagccgagaaaaatgtaagtggcatgaactggttatttggtgcacaatacttgacatattctcttaacttatgacatttttattttgctttgtttaaggggcaccacctaccggaaaccagaggtctatgcctttctgaggagcaagttgttagaacggtgagttctttgttgcttttctctgctgatttgactactaccgcaggtaaagtataagggatggatgtactgagtgatataattcgtccagatcttaaaaagaccacagattggaccaggaaacagaatcttagatatgattataggaccatacaagctgtctcggcggtgtgaagtgactgcaatccttatattatatggtctgccaaggtaaattattttagggctagtttggcaacctaattttcccaaggaaaaatgaactaattttcttggggaaatggggttgccaaactagcccttacctttaattttttcctcgattgttttattgaggtcatcattcaaggtttctgccacttccactgtgaatgaacctttaatggatcctgaaatcgtgatgttcttatgtttgaagcatagctaggtagatctacttacttcttgtttatatgatggttacacagattacaaactggttccattcttgcccatgagatgatgcatgcatatcttcgtctcaaaggtaatttatttatgctaatacttttttgtgattcacatgtatcactatcactttctgcactaattttcttccaaaaaagattgacagttgctactgttgttgctgacatgattttctctttttaggattccgaaaccttagtattgaggttgaagaaggcatctgccaagttctatcccacctgtggttagagtcggaaatcatcgctggttctagtagcaacgttgcatccagttcagaagcatcatcatcttcgtcatcctcagctcctacctcttcaaagaagggtgcgaagaccgaattcgagaagaagcttggggcattcatcaagcaccagatcgaaacggattcttccgaggcatacggaggtggttttagagctggctatccggctgttgagcgctatggcttgaaaagaacccttgatcatatgaagttgacagggtctttcccatattaaagcaacagaagtaaaggagggggctttcttccagttgtgaggatacactccacattggaggttttggtttgggttatacataactgatatgcataccaaacgaggggaattgtctgtaaatcaggagaaccctctgctgcgcggaaacttattgcaaactgtctttttataggaaaacgatacatgcaagttttcagacagggaacttgagaggatcatatgtaatttttgggcacttgtttttgactcctttggttatcaaaaacaaggcaacataataagattgaaatttatcttcatctttaaattcatcctttctctgggaagaaagataaaggtatcatttaaattaataaggagaatgtaaataagataataagtaaaatgcattggagaaagacgtgaaacatatcatacaatcttatgaacattgcttacttccttcgacttttttcaatattaaatcaaagattacatttatacctttggttttgtgaagcttacaagacgaagaaagaattacatcttcatagataagagcatgacattgtttatctatttatatgcactcttcgaccaatagataagagcacaactttcactctttttttaaccagaagatgtctaaatgtatggcattgttcatctatttataggcacagattacatatttgataaaaatacatttacgccttcagtcatcttggcgaacgaactcttgaagacctgcttcggcttcctctagcttcatcatttgcccctttattatgctattccggagcttgtatcttcgtctgcaattgattcatctgaagatgtttttggtaagagtgattgtaacacttataaatagacaagaaaacatctagttttgtgatgttttgaggaccttcgaaaaaaaatgtccccaacagtgatgatgagctctttgcttagttctctaattcacttcccttttccgcatttacttttatcccccacgatgggcaaaacttgaacttcatttacggttgtctccaaccaaatattctatatggtcctctaacctaaatatacaaaagattttctcctctatagtttgtaacggtgtcttttaagccccgtttaaatacaaagacactctttcatcctctatatagagagactttctcctcttctctatttttttgatattttagacaatgggtttaagcaaaattaaaatttgtataaggtatttgtgggtatgacaaatacatctataccaccatataattcattagcttaattttgcaaaactcaccctaccaaatcgccccccacattca

SEQ ID NO: 718 - protein, 504 aa, Zea mays
MSWLNKIFKGSVNRVSRGHYDGDWHEGHSSDHTRDTYDDSDNEDIDRAIALSLAEEDHNKGKSVAIDTDYNLEEDEQLARALQESLNAESPPRQNVPIEDVPVPQWNIPVERVPPRQYVPANEPTPHVYPRGGSRICAGCQNPIGHGRFLSCMDSVWHPQCFRCFACNKPISEYEFAMHDDQPYHKSCYKEFFHPKCDVCNNFIPTNRDGLIEYRAHPFWMQKYCPSHEDDGTPRCCSCERMEPREIKYITLDDGRKLCLECLNSAVMDSPECQHLYMDIQEFFEGLNMKVEQQIPLLLVERQALNEALEAEKNGHHLPETRGLCLSEEQVVRTILKRPQIGPGNRILDMIIGPYKLSRRCEVTAILILYGLPRLQTGSILAHEMMHAYLRLKGFRNLSIEVEEGICQVLSHLWLESEIIAGSSSNVASSSEASSSSSSSAPTSSKKGAKTEFEKKLGAFIKHQIETDSSEAYGGGFRAGYPAVERYGLKRTLDHMKLTGSFPY

SEQ ID NO: 719 - DNA, 13579 bp, Zea mays
gccgccaagcacttgttcggtttgtgtagaacttcacgctctttcctatcccggatacttatatcattattcagatgatggtgtctagcaacaacgatagcctattatcgacttggacgaacagccatagatcttcctcaataacttacgtgccgtcgcaacgcacgtgcacctacctagtaaacatataaataagaaacactaggctcaaccgttcgaataggcatctaacgacttactccagatggccgcccgggttcgtcgacaaaatgcgacggaattctctcttttagtgttctacaaaaaaactgtatattttagataaatatttacacatgagaattactcgtaaattttcgggctccgcctgatctttctacgacatagccatcaagacctaacatgacacggattcaaatacttcaaagctagacatatgaaatgaaagcattaatttccgtaaacatgccactcagcatttgcaaaacataacaacctacacaaacaagaaacacgacatcctatctcaccagtaataaaaatttgtgccagagtaatttacaaaaatagggtcattggtttcggatgccgacaaaattgcctactaaacttggcatgccaagacgagacacgcgtgaacacttttctcccagccgagggcaagcgcccacgcaaaaacggatccggacacacgttaaagcgaagcataaaaactcacacaacacacgtggaacattctagaacatcatacacaagcaacaccggcactcatgacacatcagccaacccaactgtgcacatctcatgagctagggaacccacagttggacaaacaaaacattggacccccccaagccaaggtgacacgtccagctcttatacaggacaaccacacttcacaggaaaaaacaaggcgtgaaagaaagaaccgattttgttctgtttaaatggcatttccggagaggtgttgtgctattcatttgcgtcttgtgaagtgattctagttcagagaaagaaagaagttgagaatgagaagcaagtgaggcgcgtttgctgggaagtggttcttgtgaggtttaggagttcacccttcttttcttccccttctagaaatggagatggtcctacggtcgcagagccctctctgccttcggagtgggccggtgctcatttttcgaccaaccgtcgcgggcggaggagggggcactcaggtatgatggcgcttaatcccaagttcttgattctattaagtgatggttcgcatgagtgatctctttgatgtcatctatagaagaccgcgtcagtattcgactcgatcctcatctatttagtttcgataatcttccattttgggatcaaggcggatcggaatctcgagggtgtttgatgatcgtctccatttcttgaattttgctccttttggcttttgcccaccttaatagaagccgtctatatgcgacgcgatttaccatatatattttcctgaaactttttctaccctcttccattttttggtagtttagtacgtcatttgtttcggcccgtatgatcaaggaaatgtctcttcctttggacatctaggatagcgaggatagtttgattcacaaaagactcctccattggaggatgcataaacgttgaactagccttttgttgattgtaaacatgtagtagaatgcagcggcacaaataatcagatagtgatttggggggaattcgtatgcagtactcatcaccataggaaatccagtactttactttcgagattattcaaagagtgatttgggggaaattcgtatgttgtatattcatcaccgtaagaaataccttaagctgcagaacttaccttttccgttctgttgctgttttcagtctttgttgaggactaccagatttgcgagaagaagggtcattcgatgcgttgtagcaagtccaggtctgtggagcaattttgttgaatgctctgatttctgttctactgatgatctcatgctttctaatattgcaatatatatgcaggttgtcctaataggaaatctaggacagcgtctcccaacgtaaaagtagctgcttatagcaactatgcgccaagactcctcgttgagtcaagctccaagaagagcgaacaccatgatagcagcagacaccgtgaagaaactattgatacatacaatgggctgtcaggttctgatgcagcagaattgacaagtaatagagatgtagaaattgaagtggatttgcagcacatttctgaggaggaattgccaggaaaagtatcgattaatgcatcattaggagaaatggaaacagtggatgaagctgaggtcgaggaggataagtttgaggtagatacctcaggaattgtattgcgcaatgttgcagttcgggaagtggatccaaaggatgaacataatgctaaagatgtatttgtggtagattcgtcaggaactgcaccagataatgctgcagtggaggaagtggtagatgaagctgaggttgaagaggatatggttgatgtggatatcttgggacttgacttgaataatgcaacgatcgaggaaattgatttgatggaagaggctttactggagaacttcgacgtggattcaccaggcaatgcttctagtggtcgaacctatgggggtgtggatgagttgggtgagctgccttcaacatccgtggattgcatcgccattaacggaaaacgtagaagtttgaagcctaagcccttgccaattgtcaggttccaggaacaagaacagatagttttaagcattgttgacgaagaagggttgattgctagttcatgtgaagaaggccaaccggtggtagattacgataagcaagaggaaaactctaccgctttcgatgaacagaagcaattaactgatgatttccctgaagaaggcatatctatagttcacttccctgagccaaacaatgatattgttggatcctcaaaattcttggagcaaaaacaagaattggatggttcttataaacaagatcgatcaaccactggattgcatgaacaagatcagtctgttgttagttcacacggacaagataaatcaattgttggtgtgcctcagcaaatccagtacaatgatcaatctattgctggttctcatagacaagatcaatcaattgccggtgcacctgagcaaatccaatccgttgctggctatataaaaccaaatcaatctattgttggttcttgtaaacaacatgaattgattattcctgagcctaagaaaatcgaatccatcatcagttacaatgaaatagatcaatctattgttggttctcacaaacaagacaaatctgttgttagtgtgcctgagcaaatccaatccattgttagtcacagcaaaccaaatcaatctactgttgattcttatagacaagctgaatcaattattggtgtgcctgagaaagtccaatccatcaccagttacgataaactagaccagtccattgttggttctcttaaacaagatgagcctattattagcgtgcctgagaaaatccaatccattgtccattacactaaaccaaatcagtctattgttggcttgcccaaacaacaacaatcaattgttcatatcgttgaaccaaaacagtccatagatggtttccctaaacaagatctatcaatcgttggtatctccaatgagtttcaaacaaagcaactggctactgttgggactcatgatggattgcttatgaagggtgtggaagctaaggagacatctcaaaagactgaaggggatacacttcaggcaacgttcaatgtcgacaacttgtcacagaaacaggaaggcttaactaaagaagcagacgagataacaattattgagaaaatcaatgatgaagaccttgtgatgattgaagaacagaaaagcatagccatgaatgaagaacagacgattgttaccgaagaagacattccaatggctaaggttgagataggaattgacaaggccaaatttttacatctgctttctgaagaagagagttcatgggatgaaaatgaagtgggaataattgaggctgatgaacagtatgaagtcgatgagacatctatgtccactgaacaagatatccaggaatcacctaatgatgatttggatccacaagcactatggagtatgcttcaagagcttgctgaaaaaaattattcgctgggaaacaagttgtttacttatccagatgtattgaaagctgattcaacaattgatctctatttcaatcgtgatctatcagctgtggccaatgagcctgatgtacttatcaaaggagcattcaatgggtggaagtggagatttttcactgaaaaattgcacaagagcgagctggcaggggactggtggtgctgcaaactatacattcctaagcaggcatacagaatggactttgtgttttttaacggacacacggtatatgaaaataataacaataatgatttcgtgatacaaatagaaagcaccatggatgaaaatttatttgaggatttcttggctgaagaaaagcaacgagaacttgagaaccttgcaaatgaggaagctgaaaggaggagacaaactgatgagcagcggcgaatggaggaagaaagggccgcagataaagctgacagggtacaagccaaggttgaggtagagacgaagaagaataaattgtgcaatgtattgggtttagccagagctcctgttgataatttatggtacattgagcccatcacgactggacaagaggctactgtcagattgtattataacataaactcaagacctctagttcacagtactgagatatggatgcatggtggctataacaattggattgatggactctcttttgctgaaaggcttgttcatcatcatgacaaagattgtgattggtggtttgtagatggtatgtcatctaacacttatctgcaaattttcttatgaaatcttaacaaactctactgttagcatggtatctttaaatatagcatggatatattgatagttggttggcctaccttggagtctttaagtttgtttttactccattacaacatagataacaactgatcttttatgtgtagttgtcgtgcctgaaagaacatatgtattggactgggtttttgctgacggcccaccagggagtgcaaggaattatgacaacaatggaggacatgattttcatgctacccttccaaataacatgactgaggaagagtattggatggaagaagaacaaaggatctatacaaggcttcaacaagagaggagggaaagggaggaggctattaaaaggaaggtcagttgcaataggccctttatggttctggtgtttctgtcaaacctttagcttgaccaattgtaaataaaaaattaagttacaacaccataaatttccgataagcagtcattttgagtagttaaaaagaatctcatctccgtttgattttcttttcatagttaaacatgttatttaaaaaagtccatccatcatattaactagtctgttaagacaacagagctaaactgaccatttgggccattcatcacttcagcgttgcaagttaattgcaaactactttaaccattaacctttgatggcccagctaagtaacatcatatcttcagaataccgtttgccctgctttatgttatataaaaaaatggagcacttctctctataagatataccacctcctcgaaattttattgacagatattgtaggaattcttttagttgacttttgcttccttttgattgagcaggctgagagaaatgcaaaaatgaaagctgagatgaaggaaaagactatgagaatgttcctggtttctcagaaacacattgtttacaccgaaccacttgaaatacatgctggaactactattgatgtgctttataatccttctaatacagttctaactggaaagccagaggtttggtttcgatgttcatttaatcgttggatgtatccaggtggggtgttgccacctcagaagatggtacaagcagaaaatggttcacacctaaaagtaacaggttcgaaattcccatgttattgttcttagtattaatacctttcctagtggttcatttttctgcaattaatatagtcaagaggtgctagagcactggtcatcaagtagctcatcaagaacttcttgtcttatagattgtgatgtctaacccatatatagacatgctatttttttgaatgaaaatatagatatgatatgatcattacctatgaaactgaaacaaaaaatggcactactaaattattttagaggagctagctaatttaatgccataaaacatatgctataagttttgttttgaagttttgagaaaggttgtgacagagagaatgtagctactacaaagcattgaaggtagatccctattttgttttagaatcttacaaaaagagtttaaactgctgcatttccctaggatagttagtcaaaccttgataacatgtgttaccttttcatccatattagatcagattcatgttgaatcctggcttcttttttatatactatttctgggatattttttatattcatgcagtgagatttacttctccttgagttcccttgtaataattagatttagcacagagatgcataaaaacattttctactgcccttatctgttcttagttctcaagtagagtgctccttctccagtttacgttccacgagatgcctatatgatggactttgttttctcggagtcagaagaaggtggaatttatgataacagaaatgggttagactatcatattcctgtttttgggtcaattgcaaaggaaccacctatgcacattgtccacatcgctgttgagatggcaccaatcgcaaaggttattcatatttctgagttaaattcatattattagcgcaagatcgagtggcaactcacatcaccgtttctcgtttattgttccataacactagtattctgtctgaccaatgctatcacaggttggaggtcttggtgatgttgtcactagtctttcacgtgctgtgcaagatttaggacacaatgtggaggttattcttccaaagtacggttgcttgaatctaagcaatgtaagttaaaagtggtctacaacacccttgttgcttctatgctgtgaccactgtagtgctttgtagcgagaactgaagttgacatctctaccttaggagcaacttggtctactattctactttatatgtgtgcgcttcctcatagttcagtcactcattcctcgtgtagttggatagcttatgttaagtatgaggaatgccttggaattgttgatgtgtagcttagtatatcatgtcgaattatttgtttttatttcgttttggaccattgagttatatggaatgattgaggcaaacataacttactgagtaatctgataagaaagatgtaagaagacagttattgggtacatgataaattttatctctctcatcaattaatatgcatctgttacaatgcaggtcaagaatctacacatccatcagagtttttcttggggtggttctgaaataaaagtgtggcgtggactagtcgaaggcctttgtgtttacttcctggaacctcaaaatgggtatgcatcagtatattatttacagatataaaagccttagcatcactatttcactaagctcgaagtcctaaaaccttgtactgttttgtaagtggcaatataaaattattaaactgctttgaggaaatatagattttcatgtaattactatcaacatggagaacagaactgaaagatactcctatatagattttgttttgctgcagtaagcaatgattaactacaagatggttaaaattttaaaatgtgtggggttggttgctatgtagtctcttttgggcttgataagtttggtaagtttttgtcaagaggatgaaactttagaccatctctttgttacatgttttttttctcgagggaattatggtatctgctactaaggaaatttggtctgcattctcttgctccacaaccggatgttggctcatatctaggttggtgggaagaggtgggggctgttgttaatggactcacaaaaaaggacttgactcccttatcatcctgggagcctggattatgtggaaccatagaaataaatgcgttttttatggttgcagccccaatattaccatgagtcttagagctgctgatgaggaaagaaaaaaatgggagattgctggtgccaagagcctttcctatttggcagcaccattagctgagaactaaggagggcttttttgtttcctttggtagctgtcctattttgatggatttttttatatatgcttgctatacgtaagtttggtaagttttttttttgaactgtaaatacagcaagggaagccctcactatacgtaagtttgataagttatgattagaaaatccgtttttatattaacttatattataaaaaaatagtatatacactacataattggaatcactggtcaatggtcatcacagggaagtgatggttgggaattagttgctacaatgatatatatgtaaatttgggagtctcatgttctcttttggggtagacaaattactggtaaaacaaggacatggaaaagaataatctgtcactcattcattttgtatactaaaattttaaatgtttgaataatttagataatattaaggtgataatttggtaagcttagaggcgttggatgtctaggaagattgttaagtggttagagtttcagaagtcagtaccattcttctcggttatttggtcgatctgaattaatgtatatggttttgtttaattggagtttcatctctcgtcttcagaagcaagactcagtaatcttctggcctacctttttctaagaagttggaatttatattccaaacctttttttagaatataagtactgtgaattttgtcgtatgtgtatatcagtctaatgatcttttttgcctcatctgactcatgtctgttggggtttttcgtgcagaaggtttcaaaagctaataatttggcacttgccttttttttaggatgtttggagtcggatatgtatatggcagggacgatgaccgccgatttggcttcttctgtcgttctgctctagagtttctcctccaaagtggatcttctcctgtatgtatcattcacaacagtagcggttatattgttttaactgttaccgtctttactatttggctttgctgttggacctttttttactatttgatgcacctatagctaattgttcaaaaactttcttgagcatgcagttagtgctaaacgcaaacaagagaggaattatgacaattgacaagagatataccctctgtactcctgcaggaccttaatttcccaaccatttaacacatgctgtgataaaaaaaataaaattaatcattctattttttatttcactattttagttatatatctttattattagctttacattttaaaaatattttaatgttttctgacttgcagcgaagttgcactgttagcttctcgttaaaactgctgacattttatcctccttattacagaacataatacattgccatgattggtcaagtgctcctgttgcctggctacacaaggaaaactacgcgaagtctagcttggcaaatgcacgggtggtattcaccatccacaatcttgaatttggagcgcatcatattggcaaagcaatgagatattgtgataaagccacaactgtgagtgatacactttgcataattcaatattgtgtttgagaccctgacgtacgtgtcactttaatagataattttacactgtagaattttgtttcttttgacgtttaccttttcacatatatccattctttgcaggtctctaatacatattcaaaggaagtgtcaggtcatggtgccatcgttcctcatcttgggaaattctatggcattctgaatggaattgatccagatatatgggatccgtacaatgacaactttatcccggtacactttattattcgtatgcatttttcttctattggtttacatttattccaaaagcttttccccttccctttctctctctttctctttttggtaacattttattgggttttcaactctagtctaccccaacttgtttgggactaaaagactatgttgatgttgttatacatttcttccacgctacttgaacttagtaaatgaaacaaattaaagagctgcaataataacacacctttttcttcaattgacctagttttgcttagatggacacttaagaccttaagttgaacaaagtcatttcaagtaatgtgcgtggatgtgcgtggttttcttaatccacatctcttgaatttcatgctttggcgctgttaatgttgttcaaaaaatgctgcttatacatggtgggtgtggcaagtagtttcctgcttaaatgtctgttttcaatgagtttcaggtccactacacttgtgagaatgtggttgaaggcaagagggctgctaagagggcactgcagcagaagtttgggttacagcaaatcgatgtccccgtcgtaggaatcgtcactcgcctgacagcccaaaaggggatccacctgatcaagcatgcgattcaccgtacactcgaacggaacggacaggtcattcgatcccttgcattgcatggcacatatatagaacttggaacattctttctttccttaattattcgtgcctttctgtcatcttgaaatgaaactaattaagaatgccatatgtttggtttccaggtggttttgcttggttcagcgccggactctcgaatccaagctgattttgtcaacctggcgaataagctccacggcgtaaaccatgggcaagtgaggctttccttgacctacgacgagcctctctcgcatctggtgggccgacgaagcacctgatcaaaccaactcaacctctcatcaaagtatctctgaaattcccggctaatacagttggttctctcttgatctgctgcagatatacgctggctctgacttcattctggtcccatctatatttgagccttgcggcctaactcagctcgtcgccatgcggtatgggaccatcccgattgtccgcaagactggaggtacgtacgcgtgcagcagctgttgtcgagtgtctgtcaacccggccttcgttctccatttgccattcattcatcagggctgatctctcgtgctgctgctcgtcagggctcttcgacactgtcttcgatgtggacaatgacaaggaacgagcccgagatcgaggccttgagcccaacgggtttagctttgacggagctgatagcaacggtgttgactacgcgctgaacaggcaagcacagtctctcacacagagctagctagactgcccgcttcactactgaacgtaccctagcctgcaactcttactcgtcgtgctgttctttcccgtgttctattttcccttttatttttccagggcgatctcagcttggttcgatgcccggagctggttccactccctttgcaagagagtcatggagcaggactggtcgtggaaccgacctgccctcgactacatcgagctctaccgttcagcgtccaaattgtaataatccaaccaacggccaatgtagtgtgttgtctgcaggtctcagatgcagccattcagcttttgcaggttcctgggcattgctgtacagcctccttgtctttagttagctccattccccgaggagcacagtgcaattttttatcctcagttattatgcatagattgtctcagtagaatgctttcttcgggcatgtatgtttgtttcctctgttgttgaattctggtgttaagtcgtgtataggaatctacaggaaatgaaaaagtccatttcctgcttcaaccttttagggctaccatgcacatgagacctttcaaatgcaaagaatattaggactagactactagtctgtgaactctatttttttccaaggatttctattttttcaaggaaaaataaactaatttttcttcggaaaatggaaatctttttaaaaaatggggttcccaaactagcccgtagagtatagatctagaattggtctagtggtttctcaagaaaaaaaaacatacgccttttcttgtcatatgcttatttaagtttattttgtacaaactttgagatccttcaaaaacaccccaatggctggtgtagtgaccagtgaaataaagaggatcaatggggaggaatcccccacctctctcccgcagatgtcacccagcaccggccaacctcacctgtccaggtacgaccgacgcccccttccatcttcgcccttgagcagcttgctcccttccaactttccccactccacgtgcccccttccatccttgactggatcagtgaaattaaggttggttgcgacgacagcccatcaatggaaaccaacctcgccccgtgtcgggatctaccttcctcaccaccacgccgatctcaccttccataggagctacctaggcactgttacctattataggtacatgacattgtacatctttgtatgaacttacatcaatgccaaaaatccttcaaacatggactatacagtcataggagggtatctttgtcttctcacccacaagacatgttacgcacctctcctgaactccctcatcttttcaacgcttgggttagacaaagctctatctcgtttgccacttcataaagcaggtatcaatgatatgacgaagctttgtttcctccgtaccgacaaagtatcacttcttcctccatctcgacgaagtagacaaccgaaacctatatcacctatctcctgaaacatacttaaaacatagggtttcgttacttgaagacctttagcaaagccttctccccaacagataccttatgcacgatttctacaatagatgcaaaatcataatatataaaggcttcccatgcttcatgcaacaaccctctaaaagctaggctaacatgatcatttttgatagcctcgtagagtagcatttgttctttacttctaggaatcactagatgaaatatgtaacctttttacacttatcaatttgtagattagataggtcaaaaatcttcacctcagtggctatagagaaaaaatgtgcatgtaacttctctagttctatgtagcttctaacggaatttaggctaatgaggcataacatcaaaggctgttcttgatagtgataatgagaatcatgaaattcaaagaacttcagatggagcagcaacaccaagctaggccaagtatcagctaacatgttccatggtactagtgttgttccggccactaaatttggagaacataggaacacaatacttagataaaaatggtacaacatagtatgtttctagagaaggctaagaatagtcgaatgccttcttttttgagttatgccaaaattatatcacaagatttctataagtttgtctataatacatatagtcggcatctcttgaatcttggaattgcggatataactattactccattcagtggcttctagttctatctctactcttttttccctaatgagctactattcttc

SEQ ID NO: 720 - protein, 1674 aa, Zea mays
MEMVLRSQSPLCLRSGPVLIFRPTVAGGGGGTQSLLRTTRFARRRVIRCVVASPGCPNRKSRTASPNVKVAAYSNYAPRLLVESSSKKSEHHDSSRHREETIDTYNGLSGSDAAELTSNRDVEIEVDLQHISEEELPGKVSINASLGEMETVDEAEVEEDKFEVDTSGIVLRNVAVREVDPKDEHNAKDVFVVDSSGTAPDNAAVEEVVDEAEVEEDMVDVDILGLDLNNATIEEIDLMEEALLENFDVDSPGNASSGRTYGGVDELGELPSTSVDCIAINGKRRSLKPKPLPIVRFQEQEQIVLSIVDEEGLIASSCEEGQPVVDYDKQEENSTAFDEQKQLTDDFPEEGISIVHFPEPNNDIVGSSKFLEQKQELDGSYKQDRSTTGLHEQDQSVVSSHGQDKSIVGVPQQIQYNDQSIAGSHRQDQSIAGAPEQIQSVAGYIKPNQSIVGSCKQHELIIPEPKKIESIISYNEIDQSIVGSHKQDKSVVSVPEQIQSIVSHSKPNQSTVDSYRQAESIIGVPEKVQSITSYDKLDQSIVGSLKQDEPIISVPEKIQSIVHYTKPNQSIVGLPKQQQSIVHIVEPKQSIDGFPKQDLSIVGISNEFQTKQLATVGTHDGLLMKGVEAKETSQKTEGDTLQATFNVDNLSQKQEGLTKEADEITIIEKINDEDLVMIEEQKSIAMNEEQTIVTEEDIPMAKVEIGIDKAKFLHLLSEEESSWDENEVGIIEADEQYEVDETSMSTEQDIQESPNDDLDPQALWSMLQELAEKNYSLGNKLFTYPDVLKADSTIDLYFNRDLSAVANEPDVLIKGAFNGWKWRFFTEKLHKSELAGDWWCCKLYIPKQAYRMDFVFFNGHTVYENNNNNDFVIQIESTMDENLFEDFLAEEKQRELENLANEEAERRRQTDEQRRMEEERAADKADRVQAKVEVETKKNKLCNVLGLARAPVDNLWYIEPITTGQEATVRLYYNINSRPLVHSTEIWMHGGYNNWIDGLSFAERLVHHHDKDCDWWFADVVVPERTYVLDWVFADGPPGSARNYDNNGGHDFHATLPNNMTEEEYWMEEEQRIYTRLQQERREREEAIKRKAERNAKMKAEMKEKTMRMFLVSQKHIVYTEPLEIHAGTTIDVLYNPSNTVLTGKPEVWFRCSFNRWMYPGGVLPPQKMVQAENGSHLKATVYVPRDAYMMDFVFSESEEGGIYDNRNGLDYHIPVFGSIAKEPPMHIVHIAVEMAPIAKVGGLGDVVTSLSRAVQDLGHNVEVILPKYGCLNLSNVKNLQIHQSFSWGGSEINVWRGLVEGLCVYFLEPQNGMFGVGYVYGRDDDRRFGFFCRSALEFLLQSGSSPNIIHCHDWSSAPVAWLHKENYAKSSLANARVVFTIHNLEFGAHHIGKAMRYCDKATTVSNTYSKEVSGHGAIVPHLGKFYGILNGIDPDIWDPYNDNFIPVHYTCENVVEGKRAAKRALQQKFGLQQIDVPVVGIVTRLTAQKGIHLIKHAIHRTLERNGQVVLLGSAPDSRIQADFVNLANTLHGVNHGQVRLSLTYDEPLSHLIYAGSDFILVPSIFEPCGLTQLVAMRYGTIPIVRKTGGLFDTVFDVDNDKERARDRGLEPNGFSFDGADSNGVDYALNRAISAWFDARSWFHSLCKRVMEQDWSWNRPALDYIELYRSASKL

SEQ ID NO: 721 - DNA, 8076 bp, Zea mays
gtcaaaaattacagtggccaccgaaaatgatgtacagtgctgttgtaagtgtagcttactagaatttttttagaggcttgtatagagtaaactagtgctaatgcaagtagtctgagtctctacatagtccattcatcattctctagccatctagattcttttttattatatatgttcacatcttggtagcctaatatataaagagactcatgtttaaaccgaggattggattttacgcgcatagagagattactaattgattattctaagagataaagaagtagttagcctgtacaacctctcttgcatgcatcacatgatgaactccatattatatatcatggttttaatacatttttaccatcttacgtaatcttgtgccgcgcaaatggtttgctatggcttcactcttctcttctgcgtgtgaagcgcaaccgcttaaaagcatataaaccatcttctcgggcatatagatttcttaatgacaatctcgcattgtttattgcctcacatggtgacacacagctcttacatttgtccttatactcacggtgcagtgcactactactgtaaccccatggtctggaaaacagcaacgcaacctttctgccttggaacagcaagctatacagcgctatataacaaacttgcacaataatatgctacatttctgaaagcaaactccgcttatcttcgcgttaaggaatggtattacacttaaaatgacaaaatatcacactttagaaccccacgcctttacctaaaaaaaagttgattgatacaagaacaaatgtttacagcttgttacacctcccatcaagcaaagaaatggaatcttttattttatgtacacgtgtacgggtagctattgtttataaattgcagaagacacctcaacatgatggataattgtatacgcaaaactactttcctcgaattccccattctataaattccagttaaacttaattcgtaagatcaatcataattctcgagttgcaaaccatggacatggctttggcgtctaaagcctcccctccgccatggaatgccaccgccgccgagcagccaattccaaagcgtgacaaagccgctgcaaatgattcaacatacctcaatcctcaagctcatgatgtaagttctatttttatttggccttaacagtactgttatagtgttaggaactcatatcctcctaataaccttttctacgtatcagctgtgagtacatgagtgatcttcttcctcttgcacgtgccatcaacatcatgtcaagcgagatcatttgccacgatattactgaaagtagagttaaaatcgcacagccacacgagcagtctgaccaccaccccttcccggccggaccgtgtgtcagtgtggagatggccactcactcaccgatctcgcttccacctccacgccagaggcaacgggctccccgccgtgagctcttcggccacgcgggcgtcttgcctccctcgtccttcctcaccgcaggaggatggccgcgatagcctcagcttcgcccaggaccctgatccctccgcggccgcgccaccacggcgccgcgccctccccatccacctccgacgtctcctcgctccgactcctccgcgcgcacccgcgccacgtccgacgcagccgcggagtgtccatctcgatgcccgtggcgcggagccggtcgttcgtcttctccccgcgcgcggtggctgactccaagagctcccagacctgcctggaccccgacgccagcacggtatgccccgccgcccgccgcctgcacggggaatgcggagggttctcttggagcgcctggccgtctctcgcctggccttgcctctggtccgtcgggtcgcgcctccgaggcgcatttgccgttctccgtgggaaattgggacgcgcgcggaaaagattgtttttttttgtaaaaaaaaactttatatgaataacgcgttgctcatcttgatgcgtaaattggcggctgggtttgtcgcctttccatgcgcacgtttcgtagttgctgcttagacagtattttctttttgtatgtactaggtaccgatgaatgtggcaattttatgatgccacttgttgtgaggctcatgttgttaaatatgattccttgtagtaggctagtagccaataagaatttgatgaagatggtgtcagtgttgtagttgtgggtattggatcattatttatggtttaatcgtctattcttcccatacaaatataatacttattagtttttggatctgatgcagaaactataatggccatttgctattatccttgactcgagtggcctgcgttgtttgaacttgccccgtcttttgaattttgtattttgaatttgtcataatgcagagattatgttattggtttccgtggagctaataatttttcagtttcagagctgtccttgtccttctgtggtgcccattagtttactcactcttggctgtatacaataacacacatttgttgttggttcagagtgttcttggaatcattctgggaggtggtgctgggactagattgtaccccttgacaaagaagcgtgccaagcctgcagtgccattgggtgccaactatagactgattgatattcctgtcagcaattgtctcaacagcaacatatccaagatctatgtgctaacgcaatttaactctgcttccctcaaccgtcacctctcaagagcctacgggagcaacattggagggtacaagaatgaagggtttgttgaagtcttagctgcacagcagagcccagataatccaaactggtttcaggtatccctactactgttgtgtctttctgatttcctcaaatgcaaaatctgccatttctataacatgcacattccacaccatattcacatttttctcattgcatttctcgcttcacacatcatttttttctcgaatacacacatcatttttttctcaaatacacagggggctacttatcattgtattagagagagagagagagagggagggggagagagagagagagagagagagagagagagagggagggagggagggagggagagggagagggagagggaaagagagagcgcgaggggagggagggggagagggggagggggagagagagagggagagagagagggagggagggagggaggggttgttttctttaaatcaatgaacttaaactacagacaactgaaaaatgggtgggacctgaccgttctgctggacctttatccaagcaaccaaacagacaccaccattcacttgctctcttcccttccaaagaaaggctcttatcttatcaatggctggcatctggcaaaaaacatttgggcacattaatcgctatcaagacatgaataggaatagctgataggacaaatctgacccaggtaactctccctgccgtggtcatgagagcagcattccatccagggagtttgtccctaatcttcttgatatatttgagcaattctgcattttctgttggttattgaacatgagtgtcaggacccaaggggacggcagcaaggagcgcaagtcaaaggataaaaagattagttgggattatctagtgaggttatcagttagtagtttgtttagagtttttaggagaattttaaggagataaggatctctagctagatagggatggtcagccgacgtatttatataatcaatagatgagaaataaagtagacaagaattagagggaagaaactctcattttgctcggccgtgggcagaggcccccggccggcgttattgcccatcgatccccctctccaatcccctctacgtgtctactgttcattggtgggtgtgaacagtaccccgccgcctccgccagcagctccaatccctcaccaatcggcaaccataacaatgagtttgaagtgtaccatcatgccataagcaaatgcatgctactctacatgaagttttgctagcccacttcactagtttacgtcatgtattgattttcttttatattttttctcagggtactgcagatgctgtaaggcagtacttgtggttgtttgaggagcataatgtgatggaatttctaattcttgctggcgatcacctgtaccggatggactatgaaaagttcattcaggcacacagagaaacaaatgctgatattaccgttgctgccctaccgatggatgagaaacgtgcaactgcatttggcctcatgaaaattgatgaagaagggaggatcattgagtttgctgagaaaccgaaaggagagcagttgaaagcaatgatggtacacataatatgctttcctttcaagctaacttgatttacatttgtggacaatcattttgtaaacctacaatattccattttactcctttggattgtaggataagtaaaacatagggatagaaaaaatgtaggaatagagttgcatgacacttgcaattccataggaaaatttctaagaggttggacctcattttaaaaatcatccaaaatctcactacaatggtccattctataggaattttataggatttgtaggaagtcatcctttgttccaaagagtcacataggaaaattttctataggattttaatccttcaaagttcctccattttttctttgttccaaaggagcccttaaaatgcattcacatcatattgttgtttgattgatgtaggttgacaccaccatacttggccttgatgacgtgagggcaaaggaaatgccttatattgctagcatgggtatctatgttttcagcaaagatgtaatgcttcagctcctccgtgaacaatttcctgaagccaatgactttggaagtgaggttattccaggtgcaaccagcattggaaagagggtatgcaaagttgttttaaccttttagctgtttgttttcttctgtttactgatgcttctttttttaatagaaaaggtactatataaccttttaacacagatgtcattatgccataagttggtaccctgacatttcatttctgaaaaagtgcatatctgaagttttatgtgcatcaaatgctgcctaggagcagcttactagaaagcctaggcaggttgggttgtctcaaggcaggatggaaggaagggttgcctttcagaatggaatttaagaccttatttttgtttgcaggttcaggcttatctgtatgatggttactgggaagatatcggtaccattgcggcattttataatgcaaacttgggaataaccaagaagccaataccagatttcaggtatgctttcacttctcactgtgctgcagttggaagttgcaacgctgcatgcatatcaagtcttacaatttcaattagttcctactgatttagtgttccccttaaatctgaatacagcttctatgaccgttttgctccaatttatacacaacctcgacacctgccaccttcaaaggttcttgatgctgatgtgacagacagtgttattggtgaaggatgtgttattaaagtaagcagtgcttttactgtagcatatttgaaaacctttctatacttcttttattttctccaaagtaatttctcataattcatttactaaaacgtttatgccttgatcttgtgcacacagaactgcaagataaaccattctgtagttggactccgatcttgcatatctgaaggtgctatcatagaggacagtttactaatgggtgcggactactatgaggtaaatatatacgtacaagtatatactgctgtcaatgcaacaatagagctcacacagctgtgttctttttttccagacagaagctgataaaaaactccttgccgaaaaaggtggcattcctattggtattgggaaaaattcatgcatcaggagagcaatcattgacaagaatgctcgaattggagacaatgttaaggtattccaaactgatgttccaacggtcaagaatattaatttagatttttccttaggatattacataatacttgatatgccattttgtcctcttatttttaacatttatttttgaaaatattaacttgaaaatatgaataggcttgcatgctcttttttaaatatgactgtctatacttatctttccctaattgcctgcataaattttcattcttcagttttgtctgtatttaactgaggtaatcaagatgaggttctgtttaccacaagataaaaaactgtcaacaagtcatatatcactttttattataaaaatacaaaataaaacctgaaatgcagagcttcatatcagttctttatttggctttccaatactgctcatgcggatgacattcaagttcaacccagaaagggctgccactatccagcaaaccttgctctgttatcggcattgtttgatagacctgttgcacttgactattcataaatcttcgcttgtcataggattaaacaggaaactttcattattagactttcctgccacaaattttctatggcagcggcatttctcatgagactcgatcttgtagatactcaatgctgacaatgttcaagaagctgcaatggagacagacgggtacttcatcaaaggtggaattgtcacagtgatcaaggatgctttactccctagtggaacagttatatgaagtaagctttccccctattcctacacaaactgctgtcagtaaagtttcacttgcgaagcctttgaaacatttgtcaactaggttgcaaatgctacatctttgctcgaacttgcaagcttgcctgttgaaaacatccttgttttgtgctgcgctgcaggtgaacgtgcgacatgcagctgtgtgtctcgacattcgacaatgatcagcacctggttacatgcgtgatctgcagatcagtctgttggagatcatcggagcaataaaagtgtcatccaaggcattttttctttctttttgctcttttgtgtccttcaatgttgtagggtagaatgttgtagcagcaaatgttagttacatgttgaatcgacattgggggcctggatttggggatacatcatgctgtaaattgatcagtttaattaccatactgtgctgctttgagcgaagccatggagaccatgctccacttttgtgcctgacgaatataagcgttgctggtttggagtgcggattttaaagatatataccatctgatatgttccaacatccaacgacagccatttccaccgtcacattatcaattctgcagaaagcattctaactcactactcaacacattatcaattctgcagaaagcattcttactattcaaccaggattcaaaaggtctcacagacaagattgatacgtgcctcttattaactagggtgtgaggttatttatgcaacatgtctcttggcgtgtggtgcgtaggcgtggagttcgaagacaatggtcgacgataaaggtgaaggtaatgcggattcgtaccgatggaccggcaaaagacgaacgctaagtcttttttttttgaagaaacaggagtggaacgagtcacaactgaaatatattaaaaccaataaatgttgaactattacaaaatcctattacaaaaaattatgataagagatttcttcattgttcagcagttgggaaacatttcttccgccgcatcctatgtgttagactgtgtgtgtgagtgggccggcaccactgttgggctgccggcccattagggttagggttgagtctctatatatattgtattccatctattatcaatacaacaatccactccattctacatggtatcagaggattagggttagggtttcacctcccacagcagccgccggctgcttcaaccacacagccgctgcctaccatcgctgccctcgggaggctccaccttcgctcccgggggcagcctctctcctcccagccgccgctgctgcctccctgggcaggcagccgcaccccccaccccttccccagccggctgccagcctctggccgctgccaccctccagccggcgagctcgtgctccctccagccggcgagctcggctcccttctctgccgctggccctggccgcaccggccgcgacagcccctccccgctcgggctcacctgcgcgcccacccctcccgccggcggct

SEQ ID NO: 722 - protein, 475 aa, Zea mays
MDMALASKASPPPWNATAAEQPIPKRDKAAANDSTYLNPQAHDSVLGIILGGGAGTRLYPLTKKRAKPAVPLGANYRLIDIPVSNCLNSNISKIYVLTQFNSASLNRHLSRAYGSNIGGYKNEGFVEVLAAQQSPDNPNWFQGTADAVRQYLWLFEEHNVMEFLILAGDHLYRMDYEKFIQAHRETNADITVAALPMDEKRATAFGLMKIDEEGRIIEFAEKPKGEQLKAMMVDTTILGLDDVRAKEMPYIASMGIYVFSKDVMLQLLREQFPEANDFGSEVIPGATSIGKRVQAYLYDGYWEDIGTIAAFYNANLGITKKPIPDFSFYDRFAPIYTQPRHLPPSKVLDADVTDSVIGEGCVIKNCKINHSVVGLRSCISEGAIIEDSLLMGADYYETEADKKLLAEKGGIPIGIGKNSCIRRAIIDKNARIGDNVKILNADNVQEAAMETDGYFIKGGIVTVIKDALLPSGTVI

SEQ ID NO: 723 - DNA, 2675 bp, Zea mays
aaatctcttcattccatgaagtggtgacaccttgaggtacacatgatcaccttcctcaaactccggtggtcttcttctattatcagcgtagctcttttgcctggtctgagctaccctcaagttttccctgattatacagacttgttcttctgcctcttgaataagttcaggtccaaagaactggcttcctccggtctggtcctaatatagaggagtcctgcatttcctgccatgtagagcctcgaacggtgacattttcagactggactggtaactattattatatgagaattcagcataaggtagactcttgtcccaactactaccatgttgaagggcacaagctctcaacacgtcctccaatacttgattagtcctttcagtttgtccatcagtctgaggatggtggaccgaaataaaattcaactttgtatccatattctcatgaaaacttttccaaaatctagaggtaaactatgatcctctatccaaaacgttaaatcatgtttgtttaagtccaatcgtaatcgataccacactacaaatggatatcgctttattcaaatttgttaccgccggtatttgagtgtgaatcgttaccattaccatttactttggggtgtataaaatgatataatagccgataccatataaattttttaatttggtgcctatctatcatatgtactacctgtgtatcctttggacatgatatataaaatgatttaatgctttacatatatattccttattaatttggtgcacatctatcatcagtaatttaatgatttaatgctttacatatatattccttattaatgctttacatatatattccttattaatttggtgcacatctatcatcagtaatttaatgatttaatgctttacatatatattccttattaatgctttatataacatgatgtaagcctttagcatatattatatatattactggtggtgtgctcgattattcatcgacaagtcgcttcgcatacactggtgtatcgacccaaggagagatgaatgcgatgaggctgacgccggttctcctcgctgttctgatgatgacatgtctcgtgtttgctgcaaattgtggtacgtgaaccccatcacacgatttgttatgcttattcaatttagaagaaaaaaattgatgcagtgaagtgcagcgattgccggcagccatgacgtggagacgacaccggctagcggtctccggcggccgccgccggacgaagagaagacgatgttgggaagcagcgacataaacatcaagttgtgtttgaaagctcagtgcgccggttacaagagctgttactgctgcttcactttacctggtttgccatgctggcctgatcagaacacgtgctggcaagagtgtcccaatcgccagcgactccgatccacccgatccatgaagcactccgacgcgatgccctccataggtcccagcaggttctcatgagaaaggatctggcctcgaattctcctgctttgagtgacaatatgtgataccgtgtcatgcatagcagcgtgagtgtaggatgataataaataagcaacattccatgcaacagtatgcattgcagcgtgttatatcttaggcttgtatggcaggatgtaacatacttactttgttctaaaacaaatatacttactcagttttcttgctttatggcttgtttgagggttggagaggatcgaaggtagcaagagattttagccccttcgatccactttaatttccttctcttaaacaagatcttgtgaaccttttttaggatttttatagtttacccactagttttggcactctaatcagttttactcctgctcgactcagttttcccgttccaccgttaacctgtgctcagaaatcacctcatcttacatgtagacccgtaacagggtaaaaaatggtttgttgatgcaaaaaaagatcgaaacagagattcaaactcaacacttcaactattttaacgatgccaatgaccactaaaacagatacgatgcttgtacatttaatgcataacagtttttataacgtatctctgtaacacctacgcggtcaattttttcaaaaaaaatttcccgctgctcctcctcatgtccgtcacgcgccgataatggaggctggtgcagggtgaccgcgcgcgggccagggcgctcaaggtcgcggccttcttctccatcctcgtgtgcgggacaatgggctgctgcttacctgtgttgtgttgtgctgctgctgtgcgcctgtgcctcactcgttgcaagcggtgtcgccgtcggtgacaagagaagcatcagacgtccatggtcgtggcgtcagaggcgccgccattgacggggcagctgcagcggcgacaaccacgcgcacggtcccacctgtaagtcaccgggtccatctgtaaggcatctaatggatggacggaatgtattccgtattgtgatttctaagaataagttgaaggtaagggataactgagtagaacactgagtacagtgccaaaactagtgggtggaatgtaaaatcctttttcatgtactataaagtatgagtctatacttaattccttgctaagatgttcggcttccacttaaattttgggctggctccgcacctccgcatctaatgtctttagtggatcgtgtcaaataggggatacaac

SEQ ID NO: 724 - protein, 123 aa, Zea mays
MNAMRLTPVLLAVLMMTCLVFAANCAIAGSHDVETTPASGLRRPPPDEEKTMLGSSDINIKLCLKAQCAGYKSCYCCFTLPGLPCWPDQNTCWQECPNRQRLRSTRSMKHSDAMPSIGPSRFS

SEQ ID NO: 725 - DNA, 2515 bp, Zea mays
cattcttttacataagtaattatatgttgcctaattttattccaaattacccgcaggggtatgcttctagttaacaatatatatttatcacggaagcatattgtttgctttcatgacaattccaagcaataccttgtgttactcaggtgtctttgagacactgcaaagaatttgagtccggtagtgctagcaccattgtgactctttgaaaaagccatggaaagtatttgacaagatttatggttagagatatttgctcgttaataattacgtgggaatcgacatatggccatgaactcaaggtatgtacaatcctgagactccgatttagttttcaaaaaatacaataaacagttaagagactgcatatacaacactgagattctggatcataaatataactaagagacaacatgtatggagagtcgtgaagaaacgtactattcgcgaagagcctgtcgcttgtatttttttcacttagcctcttagaaactcctagagaaaccctatattacatagggttgtatatgtcggaatacattccaatgttacaattaatgttcgtatttaccattaagcaagtagatacttaagcattaaatcattgtgcaattactttgaatactaatgtctatgatatctgtatctggatttagttgtttagataccatcgaaattaatagggttgttcataatgtgtttgaattaaaaaaacaatagctatttcgtgccataattaaattgtttgatacggatgatatcaacaaagatctagatagaaggttgggatatttttcacaactgcaaaatcattcacagcagaatatcttcgcattattataagacgaaaacatattttagtagaagattggacgatatcgaagtttcatctcgagatatcaagcaattaatgtaggacacatacaatagatttgcctaaccatcaccttctatcagtccatccatctatatatatctgcacacaccaccacagcaggttggtaaaagcacctcatccccctgcatatactaacactgcaaaactgaaaagggtgatagcaaactacaatgaggattgtgtacatggcagctgttatgtttttggttcttgcaaccatgtcttctacctccccatcattctgccaagctgggggctgtaatttttttaacttttacttatcttgcattggcttttgtgatgttcactggcaaagaaccttgcttgatctgtatggtgtttcatacgtgtaggcatcggctgcccacgggctccaccaccgccgtccgatgagacatgctacgaggacctcaagtgttcggcttcgaggtgccacctgggttgcatacacaggggctacaagggtacgggttcgtactgccgtgggagggactgctgctgcaaacattgatgcaccgtagtgcatctatgcatttcatgaccatacaataaacctagatgtgtatcctttgcctccgacgactataaatgaaatgaaatactactaaggttcagcatccggctcacactcgcccttccttgcttcacggacgcgttgaactcacctcactgctccttcctcaacgcagctttgcgccgacggccatggacccccgcgctcgctccgacgcgaatcctcgcggtcacagtcatggatcttcgttactttatgtcttcagttcagtttggtagctggtttcagttagcacaaagtagcagttcagttcagtttgataaggaagcaggtttcagcttgagaacaaactagctacctctcagtcagcttgagatcaaagtagcagttcggatgtcacattaatcacaatagtaaaaacgatacaattccgaaggctatattctgtctgatggccttctagccaaccatcggatctaatgttatatccgatggcccatgacagccatcgaatataagagcctacgtccgacggctgtcagacagaccgtcggacataaggttatgtccgaacggctatatagaatatgttctcttgaaggttacacaaacctagcctcatgggttgcataaaaaagttgtagaaaattgtataagattttcataatagtaaatatcagcagcctgactggagaagatggagcacgggaggatgatgtccgatctagcgtcacggcagaaaggcggcccaggcgcagcaagcgttcttcaaagcccaacaccaaatactacggcccacgatgggataattaaacccatttgtaatagatatatatatatataaacccttgtccggttcggtgaacagtaggctgtaagaacacagcgaactggcggcggccacggatctctgatcatcggtccgagataacgagcgagttgctctgttgtgagagaaactacccacagtgatcgcgtgtgtttacatttggtactcagagccaagtctggatccaccacacgagtactggacgcggctctaggcgaagacgacggaaatggctccaccgcgtcccgacgacctcgtgatgcagattctggcg

SEQ ID NO: 726 - protein, 81 aa, Zea mays
MRIVYMAAVMFLVLATMSSTSPSFCQAGGCIGCPRAPPPPSDETCYEDLKCSASRCHLGCIHRGYKGTGSYCRGRDCCCKH

SEQ ID NO: 727 - DNA, 2563 bp, Zea mays
ccaattaaatagttaaaacatataagtatgatactataacggtgtatcttgtagcctaagtgatatggtattggtttgtcgccagcagcacactgtattaataaacttgttctaagcggtggcgactgaaggtcgcctctccttaggggtgggctggtgctaggccagcggttgatgggatttcgagtggacgagattggttgctttgtttcctttttcgtgtgcgaagctagcgggtgggaccggtatgtagagagcgaggggaatcaagtggtgggctgtgggcaccgatgctggggggctcgagcgaaatcgtgcggaggacgattcctcatttgctatgggtgccttttagttatagatagaaagatagagatagctatatcaaattttattttttaaaaaattatataaaataagtattttcaattggttcctgtggtttctctttatagatggcttttactatatattttatcaattatgtaagctttgttaaaacagacatcaagacctaataataaacgcaagaagttacatgcatacaagagaagggcataggcacaagaaaaaactacctacaaaggtataggctgatcacacatgttcatttgaggcttggcctctggtttcgtagctatgcctttgtatggattagtgatctacttgtcatttgtgtgatgtctataatgactttgtagatgttaagatgcgtatggtgcacacgcatgctttaatggaggtgattttatagatacctgcacctaatgagcatatctgagaaagatgttcatcataaatgttagcatatcttcaaccccccccccccacccccacccccacccccacccacacacacacacatgcatatcgcttgtattgtgcatggaggatcgcaggcattaactaaactctggagtccttgtgacttccccttccctataaattccactaacgtatgcttgaactgccaatagaacatcaagtttagattcttgttcacgcgttcaaagatgcgtggggaaaacaacatagtcctccttctcctcctcctgtttgctgtaatttctccgaaccaagtaattggtagtgcttgtactccggaacagaaggctgccatcctaaatcaatgcgaagagtacatcaagcctggatacccccttatactgccatcgtacgccagtgtgtgttgcgacaaggtgagagatgtgccaaatagggacatgaactgcatcgtcgatctgctcacgcctccagagaaggcgaaacacggtgtcgacaagataaaacgtctgaaagatctctgcgacaactcgcctcatcatcaggtaaagtttcagatccattcattctgccaaataatctgcaggtgctgaaagcctcacaaatcccgttttgcgtacaacaaggtggtggtgtagacagacagcagctgtcattgctaatggagttcggaggcaagatatatggtctagtaaataaagtcgtcgatcaaagcatgacaactgtcaaatgtatctttgattaagtaaagtatcactcaagatttccagtttcttttttttttaaaaaaacgaatctggttgaagagctctatttaaattaaaaagaagaataagcttagactgagcagtacaacaaaataacagcgaaaactaagaaactgccccaacaattatgaacgagcgagaaatgatatgtaatctaaactcagccccattccacgcaagaccgtatcagtttgatgctttgatgtagttgaacaccaccactccgacgctccactgcacatctccgaatagcgggttgccacagtgcaccacatctttggaagacaaagctatatataaaacgatgagccatcgtcactgcttccattgtcgttgtcaacgatgccccatacccatctagttacagcagttatgcaggttggctatcatagtctactacaagccatgtagccgcacaataccggatccccttgcgctatcgaaggacgttgtccctagctagatatacataggctgtctgacccgactcaatctgatcgaaatttacccaaaccagttggatcgggccatgttaaagagggcgagctcggtccatgctttctaactctgcagaaaaattgggtcgagcgtgagccaccatttagaccacgggccggcacgttgacccgacataaacgaagaatccaacacatcaaccatgatgaagcacccaatcaaacatgcgacatcagcccatcataactcaacagcccatcatattctctcaatcctgatctataactctacacaaccggcaaacgggaaacctcccacggcttcgttcggagctgtcgaatataaggttttgtccgacgacttcctacagccgtcagatataagggaatacgtccgacggctatcagttaaaccatcagacataatcttatatatcttcgacggctccaactaagctatcggatataagggaatttaagcatacggcgccctagctcgccgtttcatttcgcccgaacgcaccgtcatgaaacaaagagcaagcccacgccgccggt

SEQ ID NO: 728 - protein, 108 aa, Zea mays
MRGEDNIVLLLLLLFAVISPNQVIGSACTPEQKAAILNQCEEYIKPGYPLILPSYASVCCEKVRDVPNRDMNCIVDLLTPPEKAKHGVDKIKRLKDLCDNSPHHQVVV

SEQ ID NO: 729 - DNA, 8604 bp, Zea mays
gttggatcccgagtagatccaccagcaaaagtgggggcgcccgcccctttgcttccaacccacgcaaaaacccggatccgatgaatgaccctccacctccacttcctcctcacgggcggtcgcctcgtcgtacagacgaacagaaacaaatggcaagcaaaaaaatatacaataccaacaaaataccgcgaaagaatgctacggtcaccggggtgcatctgccgccaattcgacagccgtgtgtctctgtctcttcaaagcacggaaaggcaggccgccggggcgagtgtggtttttttccttgtgtgcaagcattagggtgcaggtaccaaaactgctgcgcgtcagaaaccatggggtcatcagctttggcggattttggaggcggtgatgtgcgctccctctgttttctcatgtaccaaggtcagaaggtgacgcggcgtcggaccgtgtgcatttatttatttattattacaacagcgagattaccgtccgaatgccaaatttattactaccgaaacaaaaaaaaataccagcctcgtctgttctacttctagtacgtacgtacgtacgtacagggcgcgtcagcactgcttgtgcttgaggacaaaaaaggagtggtttttagtggcagaaagttcccgctacttgtcacgcattaaacctccgctgatttaggagtagaaaccttctttcaaaaaaaaatctttgaagataaataaaaagagagacccaaaatactccatcccaagctgatcatatccgatcatacctggacatgtaaacaaaaaatccatccgtaaaccagcatcagatgaagaaagcaaacccaatgcactaccaaaaggaaagaaagaaaaaattcctaatctttcttatccctcacctaccatttttttaaaaaaatctaatactacatgggcaagggacgaaggtggtgggagcaaagaggcccccacccctgcccccgcaatgcgtgtataaaacggggcccggggctgccgctcaactcacccatccattccacctccgttcaccccgtccatttgatttgcgttcactgcgttgcgtttccttggaggggattgttctctcctctcctttggattggaggtccctccttcttctcctctctctctcagaggaaggtaatgcaatgggggtgctctagccctctcctcctctgctcctgccgtcctgcgtgggtgcgtgcgtggacgctggtctgctgtcctgctccgggcgaaatgccgccgccgctcgccgtgactgatgctcctcctcctggtcgtgtccgaacgcgccggacggtgccgccggtagcatgtaggaactatacgctccgctcggacctggtcatgatcgatcgatggtgtaggggaggtcatgccgaattttttcgcccggttctctgaacctgccgccactctgcaggcgggggaggtgctgcctctgcatgcagttgctttccttgcagctatagccaaaacaaacaaaacaaaagacgggtttttttacggctgttgtaccagcctaccaggggatagctagcgactagcgtccgtgagatccagagaactattgtctgccacttgacgagatcctaggggagcggagggagcctgcttatccgcgcaggaacgacggtgttagcttctggatctggggtttactgagcaccaaggctcttgcaaactccgggtttaaggtttcatatatatatattttttgcatactcccgagttggtaccagaacgctagtagatccggcgcttctttgtttcctctttaattaaccaatatttttgcaagaaatatttctgtgacgattttcctcggataagttgttgccttgttggctttatccgtccggatgccccgccatgtgctccttgtctcgggactcggagacaggctgacagtcctgggttcttgtgctaatggccatggttaacttacgttaatcctgcgccttattatcatcatctaggtgtaattacttccgtttgtgctaatcacctcgtgattgcctgcaataaggaaccccagcccccccaccttgctgatgccgtgcttttctagagaagtaccctgccgcgtcacgcttcgtcctcgcctgctttggattcaacggctttttggaggccgaggccattggtgccatgcggccagcccttttcttctccatggttcccatcgatgtgtttttgttcggttctctcgtcagatctgtataaataggcgcctcccttctccgccattcctcggtcctctgaagcgtttcagttcatcgattcagttcttgtatgcctcttgttgtattggttgtttcttctttctggtctaggtactaggactatagtaccaggatctgagtcgtttttttttgggtcttgctcctgtctgccgtttctttccccccttccagagttaggttctgttggtttcttgcctgcaatatagtttcgtggcgcagcgtcaagggtgtgtcgagacttaaaagactggttgttggcagttgggtttatgtcttgctggaggggttttagttttaggatgtcatcgcagcttttatgtcaacggatctgaaccgtttttcggtttcagttttctctgctgactgaagcttccgcttccgtttcggtttcgctgtgcaggcctgaggatccaggaagaggacagcaatgggggaaggtgcaggtgaccgtgtcctgagccgcctccacagcgtcagggagcgcattggcgactcactctctgcccaccccaatgagcttgtcgccgtcttcaccaggtctgccctcatttcccccgcttcgtctgcaagtttacatttattttgctacgggtattatttgagcgaatgcgactttttaagaccagttccatcatattatgtattgttagatctagcatgatgtggccatcattcaatgctgtagacataatgttcctgtgttccctaataagatgagtatttaattagcatccaggattttgtcgaaacctagtactggatactgatgatacatacatacaccatgctttttttagtaccgactgtaaactgctgttagatctggctgcacctgcatgtgtgttctttagttttatattcaatacgatgtttctgaacagaatgattggagtctgaacttacccaatgtatagcttgttactaaagggtctatcgaatacgataatgcttgctaaccagtttatgcttagttctgacacgttctgttcagcatgaacgcataggcatctgactagatcggatgtgtaggcatgaaaggggtttcgagaagttcagttaaaagagaggaatctttgttttcattttttcgaatgaatttgctgttgtgcctcttcgctatgttgcatatgttcccacgctactgactgctgatcatacgtctaaactatttcttgaaattgtatatgtttgatgagtttatagatctggcatagtctgatgttatttggcacatcgttttgcgcaggctgaaaaaccttggaaagggtatgctgcagccccaccagatcattgccgagtacaacaatgcgatccctgaggctgagcgcgagaagctcaaggatggtgcttttgaggatgtcctgagggcagctcaggtttgcatcagattcagatctcgctggacagcactgttccttttgtagtgtgcaccttctttaatcattctagctctattatcttacaggaggcgattgtcatccccccatgggttgcacttgccatccgccctaggcctggtgtctgggagtatgtgagggtcaacgtcagtgagctcgctgttgaggagctgagagttcctgagtacctgcagttcaaggaacagcttgtggaagaagggtatgatttttgcagccccaacaacaactttgattaatataccatgattaatatacttttctaaaataaaaaggttttggtcatatatatgacagtttataatacttttggtgtatatattgcagccccaacaacaactttgttcttgagctggactttgagccattcaatgcctccttcccccgtccttctctgtcaaagtccattggcaatggcgtgcagttcctcaacaggcacctgtcatcaaagctcttccatgacaaggagagcatgtaccccttgctcaacttccttcgcgcccacaactacaaggggatggtgagccattgttttatctgtttctttacttaaatgtcatcgatattgtctagaagttgtcaaaagggtgttagcaaagtggaaattttgtatcattaaggctgacctgtgatgcatacccgataaataatgagttgctgagctgtctaaaatttttaaccacaaggacaccttaaactatttatccatatattcctgctgtggtagttgtaaattggctttgaactagctggaaaaatctgaaattctatggttccctacagaccatgatgttgaacgacagaatccgcagtctcagtgctctgcaaggtgcgctgaggaaggctgaggagcacctgtccaccctacaagctgataccccatactctgaatttcaccacaggtactgaatactttttgttgactcgtttacatatactaaagcaactgaagcatgtactagtactcttgcgatttaacacataatcctgactggacaaaaacaggttccaggaacttggtctggagaagggttggggtgattgcgctaagcgtgcacaggagactatccacctcctcttggacctcctggaggccccagatccgtccaccctggagaagttccttggaacgatccccatggtgttcaatgtcgttatcctctcccctcatggttacttcgctcaagctaatgtcttgggttaccctgacaccggaggccaggtactctccttagccactcaggcacggatacacagttaaaagaaacactgaagtcgctctgatcaatctgtattccacctgcaggttgtctacatcttggatcaagtgcgcgctatggagaacgaaatgctgctgaggatcaagcagtgtggtcttgacatcacgccgaagatccttattgtaagtgtgatgcctaatgtgataaaaaaggaaaatatagcggctaaattggtgacattaagaaccttatttgaattttttttttgcgcaggtcaccaggttgctccctgatgcaactggcaccacctgtggccagcgccttgagaaggtccttggcaccgagcactgccatatccttcgcgtgccattcagaacagaaaacggaatcgttcgcaagtggatctcgcgatttgaagtctggccgtacctggagacttacactgatgtaagtaccaaaagatactaggagttgctactaatctgttggtgaaagacatagttcttgctgactcttttttgtttgtttgaattgttggtaggacgtggcgcatgagattgctggagagcttcaggccaatcctgacctgatcatcggaaactacagtgacggaaaccttgttgcgtgtttgctcgcccacaagatgggtgttactcacgtatggactcttttcgattcaactggaagtaatttttttttaattaccacctcctgctcattcctcatgttggccttctttttccttgatacatattgcagtgtaccattgcccatgcgcttgagaaaactaagtaccctaactccgacctctactggaagaagtttgaggatcactaccacttctcgtgccagttcaccactgacttgattgcaatgaaccatgccgacttcatcatcaccagtaccttccaagagatcgccggaaagtaagtgatctatatatatacaagcaagattaatgttcaaggttgttaaattcccatgatctaatgcatgccatcttctgttctgggtcttcagcaaggacaccgtcggccagtacgagtcacacatggcgttcacaatgcctggcctgtaccgcgttgtccacggcattgatgtgttcgaccccaagttcaacatcgtgtctcctggcgcggacctgtccatctacttcccgtacaccgagtcgcacaagaggctgacctcccttcacccggagattgaggagctcctgtacagccaaaccgagaacacggagcacaagtgagaaaccgcctgtgccttgctcaagctaagcggtattggttgttgttatctgactgtatttgtatctgtatctgcaaacgcccgtgcaggttcgttctgaacgacaggaacaagccaatcatcttctccatggctcgtctcgaccgtgtgaagaacttgactgggctggtggagctgtacggccggaacaagcggctgcaggagctggtgaacctcgtggtcgtctgcggcgaccatggcaacccttccaaggacaaggaggagcaggccgagttcaagaagatgtttgacctcatcgagcagtacaacctgaacgggcacatccgctggatctccgcccagatgaaccgcgtccgcaacggcgagctgtaccgctacatctgcgacaccaagggcgccttcgtgcaggtagagccgtaacgtaaccaccagctgctgcgctgttattcagaggtcttggttgcaactgacccctggtgcctgttctatctgtgcacagcctgctttctacgaggctttcgggctgacggtggttgaggccatgacctgcggcctgcccacgtttgccacagcctacggcggtccggccgagatcatcgtgcacggcgtgtctggctaccacatcgacccttaccagggcgacaaggcgtcggccctgctcgtggacttcttcgacaagtgccaggcggacccgagccactggagcaagatctcccagggcgggctccagcgtatcgaggagaagtatgcactgacgtgaagatggtttccccagccgttttttttgatgtgcttcttaccggtcgtcgcgttcggtactgcaggtacacctggaagctctactcggagaggctgatgaccctcaccggcgtgtacgggttctggaagtacgtgtccaacctggagaggcgcgagacccggcggtacctggagatgctgtacgcgctcaagtaccgcaccatggcgagcaccgtgccgctggccgtggagggagagccctccagcaagtgatgcgcgacggcggccacagacctgatcgatcgatgagcgagagggagcactcggagtgtcgtgtcttttcccttgccatttctttctttttttcccttcccggaggcgaaaaaaagagtctgcttttgctaggcggcgggcgttcgttgctgctctttgcttcaagagttaaatttacctaccttgtcaaggtcttgttccatcattgatccgggtgtcgcttttttagtagtctgatggactgttagtagtttgcgttgcgtcggttgagagggaacgttggtggtggtggtgtgtgtgcagtcaggcgtggtgctccctttgtttcctggatgggatgttgctccttgaataataatcgtagtggccttggagcccttttcctgaaataagagcagcatcctagtgcttacctttgcagctgtaactggtgtttgcctcaggatttttgctcctcccttctatggattgtgcttaaaattctctataataaccttacagataaagctttatcacctgatcctttgaagaaataaaaacaatcttgaacagtttttgtaggaactttatctcgaataaaatggtacccaacttctatgtgctttgttctatgctacaaatattttgctccaatattatcacaccatagtcttgatgtcttaagactaggagtattaagttttttaagaagaatttgcacccacataatttctactacacatttgctatgactttataatccatttcagtactagaccttgatacggtgtcttactaaagtacacaccatgagataagatgtctaaataaactacaaaaccacttgtagatcttttatcattttatatctcgtatccagtcgacataagagaaagcactgataaaagtagaatttaactttataattttcagtcctaaactagtggtgtgtttgatatatcttaatattcacttgactgatgtccaacaaatagtagtagaagcatatagaaactgatataccttatttactaaaaacttaatattagatctagtcgatgttaggtcatcatttgacgcaagttctactgcacttctatagcttgcgtcatcatttggccctagaggaggtccttcatgaagtgatagcttctcacttagtgaaagtggtgtgcaaacaagtttgcaatctatcaaacttatttaaaaagatgagatacatactttttctgagtaagtacaatcttatttgaagttctctttacttctatatcaaaagatagtgaagatctactaggggtctatttggttgagttgtggatgtgaaaagtaattgttgtaggctgcgagttgagaaaaaagctattgtgtgatgtgaactgctaaaaagataaaaatcgttttgacacatcttcatagcgagaaggttgttctatgtagatctcttcttctagatgcccatgcaagaatgcat

SEQ ID NO: 730 - protein, 816 aa, Zea mays
MGEGAGDRVLSRLHSVRERIGDSLSAHPNELVAVFTRLKNLGKGMLQPHQIIAEYNNAIPEAEREKLKDGAFEDVLRAAQEAIVIPPWVALAIRPRPGVWEYVRVNVSELAVEELRVPEYLQFKEQLVEEGPNNNFVLELDFEPFNASFPRPSLSKSIGNGVQFLNRHLSSKLFHDKESMYPLLNFLRAHNYKGMTMMLNDRIRSLSALQGALRKAEEHLSTLQADTPYSEFHHRFQELGLEKGWGDCAKRAQETIHLLLDLLEAPDPSTLEKFLGTIPMVFNVVILSPHGYFAQANVLGYPDTGGQVVYILDQVRAMENEMLLRIKQCGLDITPKILIVTRLLPDATGTTCGQRLEKVLGTEHCHILRVPFRTENGIVRKWISRFEVWPYLETYTDDVAHEIAGELQANPDLIIGNYSDGNLVACLLAHKMGVTHCTIAHALEKTKYPNSDLYWKKFEDHYHFSCQFTTDLIAMNHADFIITSTFQEIAGNKDTVGQYESHMAFTMPGLYRVVHGIDVFDPKFNIVSPGADLSIYFPYTESHKRLTSLHPEIEELLYSQTENTEHKFVLNDRNKPIIFSMARLDRVKNLTGLVELYGRNKRLQELVNLVVVCGDHGNPSKDKEEQAEFKKMFDLIEQYNLNGHIRWISAQMNRVRNGELYRYICDTKGAFVQPAFYEAFGLTVVEAMTCGLPTFATAYGGPAEIIVHGVSGYHIDPYQGDKASALLVDFFDKCQAEPSHWSKISQGGLQRIEEKYTWKLYSERLMTLTGVYGFWKYVSNLERRETRRYLEMLYALKYRTMASTVPLAVEGEPSSK

SEQ ID NO: 731 - DNA, 7694 bp, Zea mays
agtgaagacggttgtctcacgcaatatgtgaagtgcaagatgagctctacactgcaaggaaccccaagaaaaaaccacaggtaagtttgtctgattgacaacggctagagctgtctgacgatgcagatgactccgcatgttcattcatcactttaatttgttagaaaagctacacaaaaagcacatcagaaaaaaagaagaaaaagctatttagtggtactactagttgcaacttgcaataatgatgatgataaatctgcacaagccatagctatgctatatgctatagctatgtatatgtacacaaaaaatacattttttgtgctattttttttaccgctagtataatatccatgtcttgctacaacacacaatcatatttaatacctataaaaaataaatttaatattaaaataaacatatggtccacaccatatattaaactgctaaaaacaaatattataactcatttgatcgttcatcctctttcggttagtgaggtggacagtgagagcgctgcatcgtgttattgggtttgactggtttctcacggctcatctgtgttgtaacgacctatctatggtcaaacaaactattaggattattgttaggcgaaaaatgagggagataaataaacctataagcaggacacatgaaacatatgctttaaacagtagagattaacaacataaaataaaaaaaggcaaaccgggaagcgtgcaagcccaaaggccaatcggcccagaaccagctccacggttgttcgtgtccgcccacgtggcacgcccggccattccgggcccacagatccggctcagggtcatgtgccactgccatggccccctccttgtcgcagcggcagattgcgacggggaagaaaggtgaggagaccaagcgaaaaaaatcacgctttcattgcgaggggggaggatagggaggaagacgccaagccagctccagtccggcacccgatataaagcggcaggcacttggattgctgacgagatgggactcacacgccgtcacaatgctgtgcctcgtgtcgccctcttcctcgccgactccgcttccgccgccgcggcgctctcgctcgcatgctgatcgggcggcaccgccggggatcgcggtaagctgcggcgatccgggggctggtggatttactacttttgcttttttttcttctgtactgatggttcatagtttcgcagggtggcggcaatgtgcgcctgagtgtgttgtctgtccagtgcaaggctcgccggtcaggggtgcggaaggtagatctttccccagattagaacacgttgttacggacaaaatggaatttggtagtagttttggagagagaaaaaaaactctggaatttgtggattgggtctcgctctcgctttggatttggctctagtgctttgttatcagtagtaatcattttaccaagtctagcggatctcagatttcaactgaagttgtttaaattttggtggttggttttcttcagccatcctaatcatttattacataataattagttgaaataaagtgctatatttgatatttctgtggttgctgcagcagctaattagcttcactacattttcacgtgttagcttctattgctcgtgtaattctgaatctggctttaacgcactgtgcaaggtcaagagcaaattcgccactgcagctactgtgcaagaagataaaactatggcaactgccaaaggcgatgtcgaccatctccccatatacgacctggaccccaagctggagatattcaaggaccatttcaggtaccggatgaaaagattcctagagcagaaaggatcaattgaagaaaatgagggaagtcttgaatctttttctaaaggttaggcttaatacattcaaatgctaatacaaggaccatttcacaatatttatagcacctgcccatgccgcaaaatattatctgcatcatcaacatttccggattttgtatttttttcaggctatttgaaatttgggattaatacaaatgaggatggaactgtatatcgtgaatgggcacctgctgcgcagtaagttctaatgttgtcatgcaaacatgatgtactggcggggtatcgttttttcccattttgcttgtgaagagatatcgtctgatagtaactatattaaaaaaaaagaacagctaaaacacaggagagtaatcaatgtttgggagtagaaaactgttcggatatttcattcttgtgcaagactgtcatgtcttagctgaggaggctattttttttcttgctgtgattacataatgctgttttcttcttatgacaatatactttccactattttaatagattgatgcatttgacttgagttttttactcatgggtgtagggaggcagagcttattggtgacttcaatgactggaatggtgcaaaccataagatggagaaggataaatttggtgtttggtcgatcaaaattgaccatgtcaaagggaaacctgccatccctcacaattccaaggttaaatttcgctttctacatggtggagtatgggttgatcgtattccagcattgattcgttatgcgactgttgatgcctctaaatttggagctccctatgatggtgttcattgggatcctcctgcttctgaaaggtctctttctactgtcctggaccacattgtaaacttaagcaatagaccttagcagacaaaaatatatgacaaaattatagtaccttttacctctggtttgcaggtacacatttaagcatcctcggccttcaaagcctgctgctccacgtatctatgaagcccatgtaggtatgagtggtgaaaagccagcagtaagcacatatagggaatttgcagacaatgtgttgccacgcatacgagcaaataactacaacacagttcagttgatggcagttatggagcattcgtactatgcttctttcgggtaccatgtgacaaatttctttgcggttagcagcagatcaggcacaccagaggacctcaaatatcttgttgataaggcacacagtttgggtttgcgagttctgatggatgttgtccatagccatgcaagtaataatgtcacagatggtttaaatggctatgatgttggacaaagcacccaagagtcctattttcatgcgggagatagaggttatcataaactttgggatagtcggctgttcaactatgctaactgggaggtattaaggtttcttctttctaacctgagatattggttggatgaattcatgtttgatggcttccgatttgatggagttacatcaatgctgtatcatcaccatggtatcaatgtggggtttactggaaactaccaggaatatttcagtttggacacagctgtggatgcagttgtttacatgatgcttgcaaaccatttaatgcacaaactcttgccagaagcaactgttgttgctgaagatgtttcaggcatgccggtcctttgccggccagttgatgaaggtggggttgggtttgactatcgcctggcaatggctatccctgatagatggattgactacctgaagaataaagatgactctgagtggtcgatgggtgaaatagcgcatactttgactaacaggagatatactgaaaaatgcatcgcatatgctgagagccatgatcaggtaccctgcattatataataactttataaggaagtatagttggatgcagcaaagtattttatttccttgtggggtagacaacacatggggcaagtatcttttaatcagacagtactatatttcatcacatttctatcctgattgctagtaactggattagttattcataaaaaattaggccctcctaagcatgtttaagaatttgcaatcacatatgacctgtttatcttatactggaaattaaaatcatgcaaattttcagtctattgttggcgacaaaactattgcatttctcctgatggacaaggaaatgtacactggcatgtcagacttgcagcctgcttcacctacaattgatcgagggattgcactccaaaaggttccattctcctcaagttctggttgaacctggttttcaataattcttgaatgagttccctcaatataccttgcttattgtgttctgtacactccagatgattcacttcatcacaatggcccttggaggtgatggctacttgaattttatgggaaatgaggtgaaatctcggtcttttgaaaaatgtttcccattaataagcctgcataaaccttttgtattttttttctatttgaggtttcagcatttagagtcgaccctctattttctcagtaactgaagttcctaatggctatttgaatggttaatgttaattccgagtagcgctcgttgcacatgaaaatgtggtctgtttatggctgctaatccttttgtgacttgtccaatatactcgtacaacatgggatacatgtaacccttcactattcaagcatactgcttaaatgtcaaacatcatacagagatattatcaagtctttctcctgcactatcctggaatgaaaaaaaagagttgtttcatatgctatctgtacttttacaaatgagtgtgatctttggagaagttagttgacggaatggtccactgtattttgtttgttatatgtttctccttattcatagtgtattcaattgatgtgcaattctcttctagtttggtcacccagaatggattgactttccaagagaagggaacaactggagctatgataaatgcagacgacagtggagccttgtggacactgatcacttgcggtacaaggttatgtctatgaatgcaatccttataagatttttgttctggcaccattctaggctctctttgacctttacctcttccatttatcgctgtctcctatactagctagatctgtctctgagactagctagatgtcagttccttactactattacactcttgagttgagctgggtccagatatgcttttccacactttgttttgctgccccactgccctactatagtaaattgcaccaaccccgtacatgttactcaataaacaggttggattggcctgtgcaaacctagtattttgtaagttgacctggctttatgtattgccattgttgaataaaaataattttgatgcattgattggtatgtcattttcataactttgcagacctaggaatgtacttctcaatcattggttgttttgttgatagaaattattctgtttacagcatatggtggactaaatatccaagtgaacgtttgttttgtctgtttttttttctacccctcaagtttacaatttatcccggctaacatattaatgttttctccttgctctaatgctgaacagtacatgaatgcgtttgaccaagcgatgaatgcgctcgatgagagattttccttcctttcgtcgtcaaagcagatcgtcagcgacatgaacgatgaggaaaaggtaaggatttcagaatacttggtatgagagtgttgcgacgtttctttctttcttaggaagagtggtaactctagcttgtgtgctgtattttgccgattaaggcgagcttcaatttaggagtggatggtttgtcagcattattttttctacttcgtttcaggttattgtctttgaacgtggagatttagtttttgttttcaatttccatcccaagaaaacttacgaggggtaagtcaccagttgtaaaaccctgtcttttcagagtcccttttgcctgtggtataatataatatagtgtgcttactcccatctctgctctgcaacttatatgcagctacaaagtgggatgcgatttgcctgggaaatacagagtagccctggactctgatgctctggtcttcggtggacatggaagagtaagtagtgacggtagacgctgaaagatgttttttttttttaatttttgccctactcccgtagttggggccggccggccgtcgagaatcgatcatatcaggctgtcgtgtttgcgagactcatggatgctgtgacgcaggttggccacgacgtggatcacttcacgtcgcctgaaggggtgccaggggtgcccgaaacgaacttcaacaaccggccgaactcgttcaaagtcctttctccgccccgcacctgtgtggtaatgttcacttactctcagctgaactgatgagctagaatgtatccgccctgacaaaccgtcctgctgccaggcttattaccgtgtagacgaagcaggggctggacgacgtcttcacgcgaaagcagagacaggaaagacgtctccagcagagagcatcgacgtcaaagcttccagagctagtagcaaagaagacaaggaggcaacggctggtggcaagaagggatggaagtttgcgcggcagccatccgatcaagataccaaatgaagccaggagtccttggtgaggactggactggctgccggcgccctgttagtagtcctgctctactggactagccgccgctggcgcccttggaacggtcctttcctgtagcttgcaggcgactggtgtctcatcaccgagcaggcaggcactgcttgtatagcttttctagaataataatcagggatggatggatggtgtgtattggctatctggctagacgtgcatgtgcccagtttgtatgtacaggagcagttcccgtccagaataaaaaaaaacttgttggggggtttttcttctactctgtagtctgttcttgctaggttgacgaagatgtttgatattagatgccatagatcatgtactgttaagtttcttcgttccttgttccctgtccagttcacatttgattccagctgttcagcaggccggtcagctcagctccacaccgggggccaggccggcgtcacgcaggcatcttttcatttcatgcgtcataacacaaacacttttgatcttttcgacaaaaaagatggatcgctaacgacctcttcttccaggtcttccaactcgagcagcgtcacgggcaccacaccactgggagcaccggagcagagcatcaacatccacgtggtgtcaagagtaaaagacttggaccgcttcaaagaagcctaagcctcggaccgatcacagtcacagaccatgtgcgctgtgtgtgtggctgaatgtcactggaagaaaggactggactggaatggaatggaatgcgacgatggacttgactgactccccccgtcccccggcaagcggcaacaacaacaacatccatccaccagcaacgacttgcgcagcgtcgtccatggaagaaccggtccaaccgacgggatgcgatgtcgatggcccccagctccgctccggctccgtttccaggtcttgctttcttgaacagtctctaaaatctgagtcagtatgttcttctgaaaggaacctatataattgatgattctagtttaaaatttaaaacaccatcattacgacaaagccaaataatagaccaaaacaatactttcattccaattagaagttttttttctatatgaacattcttgttagcaatccaattgccccatatataattaataatgatgggtctctctatatttagaacaaagtagataattgtctaaatatttctagcaaagtaacaataaaaaaaagatgttgaatcctctcattttgattacaaaaattgtatttcatactaccttttcacctgcacttagctaaattgtctatggtgg

SEQ ID NO: 732 - protein, 823 aa, Zea mays
MLCLVSPSSSPTPLPPPRRSRSHADRAAPPGIAGGGNVRLSVLSVQCKARRSGVRKVKSKFATAATVQEDKTMATAKGDVDHLPIYDLDPKLEIFKDHFRYRMKRFLEQKGSIEENEGSLESFSKGYLKFGINTNEDGTVYREWAPAAQEAELIGDFNDWNGANHKMEKDKFGVWSIKIDHVKGKPAIPHNSKVKFRFLHGGVWVDRIPALIRYATVDASKFGAPYDGVHWDPPASERYTFKHPRPSKPAAPRIYEAHVGMSGEKPAVSTYREFADNVLPRIRANNYNTVQLMAVMEHSYYASFGYHVTNFFAVSSRSGTPEDLKYLVDKAHSLGLRVLMDVVHSHASNNVTDGLNGYDVGQSTQESYFHAGDRGYHKLWDSRLFNYANWEVLRFLLSNLRYWLDEFMFDGFRFDGVTSMLYHHHGINVGFTGNYQEYFSLDTAVDAVVYMMLANHLMHKLLPEATVVAEDVSGMPVLCRPVDEGGVGFDYRLAMAIPDRWIDYLKNKDDSEWSMGEIAHTLTNRRYTEKCIAYAESHDQSIVGDKTIAFLLMDKEMYTGMSDLQPASPTIDRGIALQKMIHFITMALGGDGYLNFMGNEFGHPEWIDFPREGNNWSYDKCRRQWSLVDTDHLRYKYMNAFDQAMNALDERFSFLSSSKQIVSDMNDEEKVIVFERGDLVFVFNFHPKKTYEGYKVGCDLPGKYRVALDSDALVFGGHGRVGHDVDHFTSPEGVPGVPETNFNNRPNSFKVLSPPRTCVAYYRVDEAGAGRRLHAKAETGKTSPAESIDVKASRASSKEDKEATAGGKKGWKFARQPSDQDTK

SEQ ID NO: 733 - DNA, 10602 bp, Zea mays
tcagctgcttcttcacttttctgtagctgcgtctagagtctgagccaatgagttcctccaaataaaacctgcaaataagtcaacatatgtactttgttaaatattaattcatttctacttattcaaatagcacagcacatgctgagacaccataataatcaaattcttagtatttagatccatctcatcaaccaactccaaagatatgtttgacagttcttagtatttagggactgctgccgagtacgttccttcagatcctctttggttcttccttttctattttatttatattgtcactttactagaccatagtaagagagaattctcttttgtgttaattaaccacccacaccgtacaaattgagcaagcctttgttatctccacatacatgtatattaatataagatacatatatctcgtttttaaaagaaatatcgcattggtttattattttaagactagtttgtaaactctatttttctgagaaattcctatttttcaagagaaaataaactaatttctttgaaaaaatgtaaaacttttgataaaataggattgtcaaactagaccttattatatgtatatgtatatgtataaagtatcactgtgaaagtatgaaaaaagtttagttcttttcttttggtgaatataagagtataaataataaaaagtggaatagtatagtgcctgaaaagcggcaactagatcgtgtttgccagtacgcgggccccacagaaaaagcccacgtccgcctcccgctgcgaaaaaacgacacgggccgagtggacgacggtggccggacgcagacgcagacgcttccggctgtgaaaaaacgcacgctccgaccccgccgtccgccgatccgaggctccggccccactctgtcagcgtcactgcgtgagcgagcgggcggcgtgcgtgatccggacccgcccctcctcacaccgtcgcgcacgggagccaagacgagccgcgctccgtcgcatccacctcgtctcgtcacacactccactcgaacgcactacttgatcggccaaagccaaacgaactgggctccctcccctccacttcctctccccatggcgcagcagctcccctgcgtctcgtcgccgcgcccgctgctcgccgtgcccgcgggccggtggcgcgccggcgtgcggggccggcccaatgtggcgggactggggcgggggcggctgtctctccacgccgccgccgcgcggcccgtggccgaggcggtgcaggcggaggaggacgacgacgacgacgacgaggaggtggccgaggagaggttcgcgctgggcggcgcgtgccgggtgctcgcgggaatgcccgcgccgctcggcgccaccgcgctccgcggcggtgtcaacttcgccgtctactccagcggtgcctccgccgcgtcgctgtgcctcttcgctcccggcgacctcaaggcggtgagcatcccccacccctagtctttgatgaatgcaatttctgcaacgcgtgctgcgatccttctgtgtcgttcttcttctcttttggaatttgaatggaagggaagtcggcttcataacttactcctctatttctctctctctcgaataacttgcttctccgatgctgtacgctaatttgtttggcttcatagcatacgccggtgctgaaatggactgagttctctgtattcctggtatgatgcaggatagggtgaccgaggaggtgcccctcgatcccctgctcaaccgaacgggaaacgtgtggcacgtgttcatccacggggaccagctgcacggcatgctctacggatacaggttcgatggcgtgttcgcccctgagcgcggacagtactacgatgtgtccaacgttgtggtggatccatacgctaaggtgacgggctgttgtcctttactttggctatgcgtgtgagctgtgacacactcagaaactgattgctgggtgcttgctcatgttttagttgtttacttcttcttgttgttgttttctctaggcagtggtaagccgaggtgaatatggtgtgcctgcgcctggtggtagttgttggcctcaaatggctggtatgatccctcttccctataataaggtaagccagaactactctcgctcacactaccttcctgtttgctttcatgctgtatccttctcttccagttttatgtccccatgtctgactcactcacgattaaacaataaaaagaaaccaccgcatatatttggtcattgatgatttgaaaagtccgatgaactaactgaacaaagcgctagaactatcaactgtaggttaggatcattggttctgttacttagtttctcgtttgcaggttcaaatggagtgaagttatatttactgcgtattcatgttgtctttgttatttcatttcgtatgataagggtttgcatttgcagtttgattggcaaggtgacctaccccttgggtaccatcagaaggaccttgtcatatatgaaatgcatttgcgtggattcacaaagcacaactcaagcaagacaaaacacccaggaacttacattggtgctgtgtcaaagcttgaccatctaaaggtactgttacgaacagactagctataagtctgcgaaagtgtcctcatgcatttgtttaggttttgcaactatgccaagtaatgctgccctagtctattagttcataggcataaacacagattttactttgtgcttacataaatgtttttgctcagtaaacttgtcagtggtattggtcgtcttagactttttggcatgtgtttgttgttggaatataatataagtgaattgtcaaccttctcctatcagcttaagcttttggatagaaagaattggttggtgcatgtaacttaatatggtattaaagacagaggtcatgaattcgaatcctgactagcacaattaaataaaacccaaaagcttaagcttataggaagagatggataattcacttatattatattctaacatttatgactaaactctttgtttgacctgcataaactcccttcacaggaacttggagtgaactgtatagagctaatgccctgccatgagttcaatgagctagagtacttcagctcctcttcgaagtatgtggatttggattacagtatatagatgccatcagttttataggactctggaactgatatctttttgtttcattgagcatgatcgtatatgaccttttcgttctattttccatgatatttcccccatttccagatttgctagtgtgatctccaattttgtgccttacccttatagcttgatcacaactgacttatattcatatattgacacattatttcatataattgttcatccttgtgccaggatgaacttctggggatattccacaataaattttttctcaccaatggcaagatattcttcaagtggcataagagactctggatgtggtgccataaatgaatttaaagcttttgtaagggaggcccacaaacggggaattgaggtaaccaagccaatttaagttaatggctgaatgctaaccgaaataagagcttccttatatcatttttgacatggagatatgtcactattaggtgatcatggatgttgtcttcaatcatacagctgaaggtaatgagaaaggcccaatattatcctttagggggatagataatagtacatactacatgcttgcacctaaggtgagatacattattcatcttgtaatcgttctttcatggaccacaaagtatttatgtattccatttcatagattcacgtctatataacaagctatttgaagagcatttatttgtgcagggagagttttataattattctggttgtggaaataccttcaattgtaatcatcctgtagtccgtgaatttatagtggattgcttgaggtacaaatctgtatataacttctgttaaattgctcctaatttccttctgccgcttgtcattctattggatgatgcaagtttttgagggatggatagcaatgtttatgctttgctgcctgaatatataagcattttaaatttctagtattcaaacaaaacaaagaaacaagttttctttaattgatatttcgtcattgactatcagtgtttaagctatatatttgttaagataaattgtttatgcactaatatttgagtttgatgttgcagatactgggtaacagaaatgcatgttgatggttttcgttttgaccttgcatctatactgaccagaggatgcaggtaaaatgttattcttattttctccttattttgtctttttaggcatttcttaagccaacctttcctttaccagtctatgggatccagttaatgtgtatggaagtccaatggaaggtgacatgattacgacagggacacctcttgttgccccaccacttattgacatgattagcaatgacccaattcttggaaatgtcaaggtagctgttatattttatacttatgttttattttttttctccaaaagcgcaggagaactgcgccccattatatattaagaagagagaaacaaaggtctatagaagacccagatacaagactctccttacggaggccagaaacaagcatacaaaaaactgtccataaagacactaaccctcccaacatctgcccctaagcattaggaagcggagccaactacattcggggccctagccaggtctagtgagcctagatttttagctccagccataacccaacatacaagttcatctaagaagcttctctgtagtcttgctagtgaaggagattccacattgaagattactttgttgcggtgaagccatacacaccatgcccccagaatgatgacactgttgagcccctttttcctacttttgtgccctctaataaccagacgtctccaccactccgcgaaagagggttcatcaacagcaggagtaaggtggcccaagctgaaaggagataaaatactgaaccaaaattgacgggtaaagatgcatgaggttaggaggtactgaattgtttcctgttgttgatcacataaggagcaagcatctggatgtggcaaacctctcttttctaacctgtcagcggtccaacacctattcctcatagccaaccacaggaagaatttgcatttcggaggagcccatgtcttccaaagccttttccatggctcaaaggtggttgaacctgagaataagatttttcaacaagatttagacgagaaattccctgagatctcattcctccacctgtgctgatcaggaacttgggataattcaaccccctcactgaatcccataacagcaggtactgctgcagcccagccagcgagagaggtgctttaatatccctaacccactgccaattttcaagggcttgagccacagttcttgaatatagaaatattttgcccaccttagctaccacctcaggggcaaaatccctgatcgcagccccatttagccatctatcagtccagaaaagagtgctggtgccattcccaaccatagaaatcagagaatctgaaaacagattcttgacatgctgctgtataggaagcttcagtccctgccactgccaaggcctgtttgggtccatttttttccaaccataaccattttgattgaaaagcccagctcatgaattgcagattagggattcccaagccccccaagatcaataggccttgtaacaatatctcaagaaaccagacagctgcctccattagcctctttccttctcttccaaataaatccccttctaattttgtctatagctttaatcatccaattgggaatattcattgcaataagaagatagactgggatagccgaaggcacatatcgcacaagagctattctaccagcaaggttaagaagatgtgctttccaatttgcaataagaaggttatttggttgattatgattcttaatacttatgttttatcatctgcactaactgaagattcaaagccattttgtggttttggatacgtgtacacatgctatgtaactaatcacagttaccatgtgcttgatgcttttgggtaatatatgaacctgattggctgttaaatatgcagaacagtatatataatattcgactgtatcaacatattgtagtttcttggtttttgttctcactacttcctccattgtatttatagctcattgctgaagcatgggatgcaggaggtctctatcaagttggtcagtttcctcactggaacgtttggtcagagtggaatggaaaggtaagatattttcagagacttgaaagtctttttgctacttggtactttctaaataacaaatgaagccttgtcaaatactgaatgtaagtttcaacagatatatttaaatagatgagtgcttctatctacctgtgaattgttgcagggatctaaaactgtttaaaattctaacgttagtttcttctagaggcaaatcggtaatttggtctggtaagtggatacagtttggaataatggatggaaccagaatctacgttcaggcccaactatcaaacagactcagggctgtttgggggcaagttccagttccagttttcaagcttctgaagaagctggctccaaggaacctgagcctaggatacttggatctcatcattctgttttttgttctagagaagctgggttcagaaaggccaacacttaggacttcccagcccaactgtttttatgtgggttgagcagagaaaagcccagctagacagaaaacacaaataactgcatttgttggacttatagaattttaaaattataaacacaagaatgatttttgagatatacttcacaggccaacacttaggagtatgtttcaaacaatagcctcactgacaacattaggtaagtgcatctttgatctttatcagagcatgatgctgatgaagttttgataattaccatatgatcttttgcatccttcttcagctaaaccaacagcttccaactttttgttctttatagttgtttcaccaaagtactaacttgcttagttgttttctcagtatcgcgataccgtgcgtcagttcatcaaaggcacagatggatttgctggtgcttttgctgaatgcctatgtggaagtccacagttataccaggtaatgtaccataagtacccatcaatgagcacggtgctacatgacctgaacagaaacttttgaaggaactgggtgatagtgttacagataaacagaaataacataatatgacaatatagcatatatttcagcctagaagtttaacacaagttccattctatgtagtagtataacctttaggatccaatctgcgagtgagagatcacattcttttctttgagtgtctaattgacctcttcaagccattgaaaactcctactatatatgtattttgttggatgagaagccgcatgaataaatactatcttcatgtagaactgatgaaagcattaacaatgaattgccgaatactccatgtattgtatgcaattaggtggattagtgtttatctacaaataatagtttggtattgataagtacatgccttttattatcaggcaggggggaggaagccttggcacagtatcaactttgtatgtgcacacgatggatttacactggctgatttggtcacatacaatagcaagtacaacttgtcaaatggtgaggacaacagagatggggaaaatcataatcttagctggaattgtggggaggtaatttgaaatctcatgcttttatctcttgtaggctttttatgttagtcaaatgtctgtcaaatgacttgtcatagttttctagccatgagtaccaaactggtttcacctaaacaggctatatagtttgtacacgtgcatttccagctaaatttatgtggcaagtatatacagatcatctctatagtgtagcgcactttagagtttcatttgaataatgcaggaaggagaatttgcaagtctgtcagtccgaagattaaggaagaggcaaatgcgcaatttctttgtttgtcttatggtttctcaggtaagaattagtatttgatgttttaagttttttatggattgtgctttcaggtccctgtttgttcagggtagaactcaaggttgcatttgtagtcagtggtatgctggaatatgcatcattggttcagtccttgagtttagtcacttgatgagggttactacttgctaggttgtgtgaggatctgtgttttccaaaagattatgacatgttgcattgaatatccaactagctgtatttgtacctgggaaacatagttatttaaccaaaaattactgtaaacatcatttatttgacaaggtttcagtctttccctgcatcctaatataggggtaaggttaaagtggatctgaagtcacattgttatttttttgtattgatctactactacctagtcaattgttttcattttctaaatttttagggagttccaatgttctacatgggcgatgaatatggtcacacaaagggagggaacaacaatacgtactgccatgaccattatgtcagtccgatgccagcacatattaacacattgttttaatcaatttctttgacattcttgtaatcttctagccttttattttggttgtgcaggtcaattatttccgttgggataagaaggaagaacaatcctctgatttgtacagattctgccgtctcatgaccaaattccgcaagtaaatactcttcccgccaaatagtttccgtgctaaaccgatgatggttcctctgttcaccaaatggcgagatcctgtacagtttacgttgtcatactgtctattcatgttctgttggtgtgcaatacagagaatgtgaatctcttggccttgaggacttcccgacttcagaacggttgaaatggcacggtcatcagcccgggaagcctgactggtcagaggcaagccgattcgttgccttcaccatggtactgacataacacctaccaccatcatcactagtcatttcaagaatcgtttttctaccattaagtagatcagagagagatcgaaaaaggagtgatgatggtttcttatgtatctgttactgcagaaggacgaaaccaaaggcgagatctacgtggccttcaacaccagtcaccttccggtggttgttgggcttccagagcgctctgggttccgatgggagccggtggtggacaccggcaaggaggcaccatatgacttcctcaccgatggcctgccagatcgtgctgtcaccgtctaccagttctctcatttcctcaactccaatctctatcctatgctcagctactcctccatcatccttgtattgcgccctgatgtctgaaagaagcagatacaatagagtatactatagcggttgttctctaggctgtagcatgcagtggaaactggaaaatgttggggttgctctgttgtcggtagtttacatgcgcatgtcggtatgtgtagctaaagctggtggatctcagttctcagatcggactcgagacggggaaaaccattgcccagttggctggttctctgaagttttgtttggtgtaaagaaatggtggtccatcatctactcaaatttttttctcttttttaatgaaataagttgactcaaaatcaactcattcttcaacttaataattagtatatacacaaggaataaattaattctatcaaatttatgaaatgaaatccaacattattcgaaggactgacgactactaacacggcactgctcccggagaaagaggaaaacctggcaaatggattacgggtacgagggtcggctaaagtaaagagtacggacaaaactttcatagcataggctcagagcttacgttgtcattataggcgatactgtcctaccaactccgccgtttgcgctacaaacttcaggtatccttggtcatggtcacataccttcgaaggtatggagcattgtacccacgtaaacaacccagagtatttttaaccaaagtacgttggcaagaacgaagcacagtaccaacacgcttgtcaacagaagaccctttttacctttctacacactccctaggggagatccttgtaagaggcatcttccttgagctgtaaaaggaagggttggtcttctctattcagatgagacacacactccgacccacgcacgcacgtactcacaccagagacttgggaacgcttccctctctcgccagcttgcaacctcgtactacgaataatttggtgttggtagtgtaagccaccgaagactagagtagggatattcggccgaaccaatataattcatgcgtccacatcgcaaaccacccggcctaacgcgcactacaaatttattcgtcggtacttactcgaaacatcgccactaaggccagggttcaagcccaatatctaacgctcccataccattgttaggtgtctaggacattggctctgttgggggccttcctctttcgaaggtcctcaaaagtgcgactaaccatttgttttcagtatgatatagattattacaggaagcttcatctttgggatgaaagttctctcatgataaaggcatgtgatatgaatatacaacccgaaggtgacatggatggacgccgaagctatggctcaaggagct

SEQ ID NO: 734 - protein, 789 aa, Zea mays
MAQQLPCVSSPRPLLAVPAGRWRAGVRGRPNVAGLGRGRLSLHAAAARPVAEAVQAEEDDDDDDEEVAEERFALGGACRVLAGMPAPLGATALRGGVNFAVYSSGASAASLCLFAPGDLKADRVTEEVPLDPLLNRTGNVWHVFIHGDQLHGMLYGYRFDGVFAPERGQYYDVSNVVVDPYAKAVVSRGEYGVPAPGGSCWPQMAGMIPLPYNKFDWQGDLPLGYHQKDLVIYEMHLRGFTKHNSSKTKHPGTYIGAVSKLDHLKELGVNCIELMPCHEFNELEYFSSSSKMNFWGYSTINFFSPMARYSSSGIRDSGCGAINEFKAFVREAHKRGIEVIMDVVFNHTAEGNEKGPILSFRGIDNSTYYMLAPKGEFYNYSGCGNTFNCNHPVVREFIVDCLRYWVTEMHVDGFRFDLASILTRGCSLWDPVNVYGSPMEGDMITTGTPLVAPPLIDMISNDPILGNVKLIAEAWDAGGLYQVGQFPHWNVWSEWNGKYRDTVRQFIKGTDGFAGAFAECLCGSPQLYQAGGRKPWHSINFVCAHDGFTLADLVTYNSKYNLSNGEDNRDGENHNLSWNCGEEGEFASLSVRRLRKRQMRNFFVCLMVSQGVPMFYMGDEYGHTKGGNNNTYCHDHYVNYFRWDKKEEQSSDLYRFCRLMTKFRKECESLGLEDFPTSERLKWHGHQPGKPDWSEASRFVAFTMKDETKGEIYVAFNTSHLPVVVGLPERSGFRWEPVVDTGKEAPYDFLTDGLPDRAVTVYQFSHFLNSNLYPMLSYSSIILVLRPDV

SEQ ID NO: 735 - DNA, 7816 bp, Zea mays
ccagccccagtccacacctcgcggcacgcccgatgcgagtgccgtttggcgcgcctcatcatcgctcaccgtttgggggcctgcctctgcctttctgttcttcaaacgatgtctcatgtctgcgctggacaactttcttgttgccgcctgtcgcttgcgctgtgctgactggacgcagctccggaggtttggttgtgcttggttttcgtagagaactcgccacttgccgcccgcacgttcttggtgtttcctcctccccgctgtgttctgcgcacgggctttttctgagagacccatgtttcccttttacttttataaacagtatacatgctatgtttctagaaggaggggaaacctaatccccctaatccaatggcggggaggaaatagggtggggtggggtggggggagggaaatatctcgctactttttaatccggacaagctcatttgcgtttgcgtctgaatgatgatgactgcaatgctgatcgcacctcgggtgtcggatcaccagcttttggctgctctcaccaaatcagctgcaagaagattagagctcaaaagaattacagaaagagagcctttttcttttcttccttgtggggttcctttcatttcgtgctctcctttctctgccagccagtccgtccttgcgtccactgcacctgcacacaggtcaccccgacccgcactgttctagactccattagaaaaaaaaaggtctgaacctttccgaaaccagccagccattggtctggcaggccagcatatgctaattggatttttttgccgcatcattgagtgcgccatcaggatttggaaatcctggttttgagtaatacagtaatttggcattatccattgccgaattcccaagctccgtcagcttgaacgtggacccctaccatctgcaccagctcggcacctcacgctcgcagcgctaggagcctaggagcagctgcccgtctatttattggtccctctcccgtcccagagaaaccctccctccctcctccattggactgcttgctccctgttgaccattggggtatgcttgctgccttgctctcctgttcatctccgtgctaaacctctgtcctctgggtgggtttttgctgggattttgagctaatctgctggtcccggtagaaaagatcatgtcccctgacgagctcaagcgctcgccttagccgcgtccttgccccccgccattttttgcggtttcggtgtgttcccgtgactcgccgggtgcgtcatcgcctgaatcttgtctgggctctgctgacatgttcttggctagttgggtttatagattcctctgatctaaaccgtgcctgtgctgcgcacagaactctcccctgtcctttcctggggttttggttacgtggtggtagtaagcttggatttgcacatggataaagttgttctaagctccgtgggttgcttgagatcttgctgttattgcgtgccgtgctcactttttttgcaatccgaggaatgaatttgtcgtttactcgttttggtggattattagcgcgaaaaaaaaactcttttttttttgttcttttactacgaaaagcatcttcttggattttgctatcttcttttactacgaaaaactcttgagtctaggaatttgaatttgtgatgtccattcttgcagtgcgctgtgctttattgggaagccaaatcctattattttctgcctctagggtctgaatggaatcagtactcttgagacagaaaatcaatccaatcaagttgatttctttctttaaaaatattatcacagaactaagtgcttgtgcggaatcagtactggcttttgtttggtggaggatcaatacttgcttttgtttgggggtggcaactgttttgctataagattccatgtgttcctgttgagatgaatcatatatagtatagctgcatactacaaatctgtttttcaaatttaggttgctttggcatgatctatttttttgtcagacagactttctaagtggtagctcttgatttcttgttcttgtacaactggtgctgctgaatcttgaccgtatagctcgaattgcagtattctgaaccatcgagccatggctgccaagctgactcgcctccacagtcttcgcgaacgccttggtgccaccttctcctcccatcccaatgaactgatagcactcttttccaggtgggcttaccaaaatcatataacttgcatttcattcggtactgaaagttgttaatttgttattctcttcatgcctgtcttaatagcacacccagatgtaaacacgagattatgcaacttcttacttggtttcttttgttggcaccatcatgcatgctaattgctaaggatgttacctattcatccttgactcatattatcatatgtaatgattttatgatctcgagactattgattgtgaagcatagtatagctgttcttcagtttttgtacccttttgtttttttccttaagctagaactggtacaatttagttgataagacagtgtagtttgtagtacgtcatttgacagattgtttgtctttagctggtaaagtgccatttaatatctgtatccttcagatctaataaaaaggatatgagatgtccatcacaagaggggaaaaattacatgatctgagatgtaacatccgtttttatttgtgaaataccacttctacaggtatgttcaccagggcaagggaatgcttcagcgccatcagctgcttgcggagtttgatgccctgtttgatagtgacaaggagaagtatgcaccctttgaagacattcttcgtgctgctcaggtaacactagcactgctgagatgtctgcttgagtgcttgccaattgaaactaaggtactctttctaatttcccttgtctgcatataggaagcaattgtgctccccccatgggttgcacttgctatcaggccaaggcctggtgtctgggattacattcgggtgaatgtaagtgagctggctgtggaggagctgagtgtttctgagtacttggcattcaaggaacagctggtggatggacagtaagttctttgatgaattgtttgtagtctttagctatgtctatattctagttatactaattccagtccttttttaccagatccaacagcaactttgtgcttgagcttgattttgagcccttcaatgcctcctttcctcgtccttccatgtcgaagtccatcggaaatggagtgcaattccttaaccgacacctgtcgtccaagttgttccaggacaaggagagtttgtaccccttgctgaacttcctcaaggctcataactacaagggcacggtgagcttccacagtccagagtcttttaagcacatgcttcacaatggatgatgtcaatattttcttactattatctaggaacttcacataacctgaaaatggattaaatgatgccatctgattatttctaactgctgttttctgttacagacgatgatgttgaatgacagaatccaaagccttcgtggtctccaatcatccctgagaaaggcagaggagtatctactgagtgttcctcaagacactccctactcggagttcaaccataggtgaatgctcaataaaacgttctgtacttgctatggaactttggttgaaatatgacaaatggattaactgcctataatgccactatgatctgtgttaggttccaagagcttggcttggagaagggttggggtgacactgcgaagcgtgtactcgacacactccacttgcttctcgaccttctggaggcccctgatcctgccaacttggagaagttccttggaactataccaatgatgttcaacgttgttatcctgtctcctcatggctacttcgcccagtccaatgtgcttggataccctgacactggcggtcaggtacagaagcttagtgattactatttcctttaggctttgtttgggtatagagggattgaagtgaattgaggtgtattaaagaggattgaaagaaaaattagtttatattacacttcaatacaccacataccacctcaatccactccaatttgagattacccaaacaagcccttagctacttcaccttccaggtttctcatttgcgatcgctttgcaggttgtgtacattctggatcaggtccgtgctttggagaatgagatgcttctgaggattaagcagcaaggccttgatatcactccgaagatcctcattgtatgtttgagcccacgtttcaccttctgaatcctttttttcactgtgccttgatttactcagtaaatgtgcctacatgatcttatttgttgcaggttaccaggctgttgcctgatgctgctgggactacgtgcggtcagcggctggagaaggtcattggtactgagcacacagacatcattcgcgttcccttcagaaatgagaatggcatcctccgcaagtggatctctcgttttgatgtctggccatacctggagacatacactgaggtataccgattatctgactggatgtcctacacagcatagcatgtttgagtaaatactgaagccatgcattctgtgctgcaggatgtttccagtgaaataatgaaagaaatgcaggccaagcctgaccttatcattggcaactacagcgatggcaacctagtcgccactctgctcgcgcacaagttgggagtcactcaggtctgtctgtttggttttacatgagtatttgagtatctttaaaattattaagttattatttcaattgcttaatggttttgtacatacttgcagtgtaccatcgctcatgccttggagaaaaccaaataccccaactcggacatatacttggacaaattcgacagccagtaccacttctcttgccagttcacagctgaccttattgccatgaaccacaccgatttcatcatcaccagcacattccaagaaatcgcgggaaggtagaatttgtatattagtatcgctgtgctttagtagtaaataaaactagtatgtgatgttttctgtgttgtttctgcagcaaggacaccgtggggcagtacgagtcccacatcgcgttcactcttcctgggctctaccgtgtcgtccatggcatcgatgttttcgatcccaagttcaacattgtctcccctggagcagacatgagtgtttactacccgtatacggaaaccgacaagagactcactgccttccatcctgaaatcgaggagctcatctacagcgacgtcgagaactccgagcacaagtgagtatactgaaaactggttgcatgtcttactgcagccaatcagcttgtaaatactccaacacccatcgcatgatctatccatctttctatctgtcacctgagctgaacacctggtgtttacttgcatccaggttcgtgctgaaggacaagaagaagccgatcatcttctcgatggcgcgtctcgaccgcgtgaagaacatgacaggcctggtcgagatgtacggcaagaacgcgcgcctgagggagctggcgaacctcgtgatcgttgccggtgaccacggcaaggagtccaaggacagggaggagcaggcggagttcaagaagatgtacagcctcatcgacgagtacaagttgaagggccatatccggtggatctcggcgcagatgaaccgcgtccgcaacggggagctgtaccgctacatttgcgatacgaagggcgcattcgtgcaggtatatgcacacacacacacacacttgatctaatatctaacctcccaagttcccacaacggtgcaatctactttcagacaacaacagtcactgaatcatttcatcactttgttttttttttgtgtgggtagcctgcgttctacgaagcgttcggcctgactgtgatcgagtccatgacgtgcggtctgccaacgatcgcgacctgccatggtggccctgctgagatcatcgtggacggggtatctggcctgcacattgacccttaccacagcgacaaggccgcggatatcctggtcaacttctttgacaaatgcaaggcagatccgagctactgggacaagatctcacagggcggcctgcagagaatctatgagaagtatgcatttttctctcctgccatacaatgtaaaattcttgttgcctgaaggcgcatctgttttactcccacggacactcggaaatctgctgtacccttatctagttaggaggagtggtagtaaaaaaaatcctgacactacaagctttggattgctcaggtacacctggaagctctactccgagaggctgatgaccctgaccggcgtgtacgggttctggaagtacgtgagcaacctggagaggcgcgagacccgccgctacatcgagatgttctacgccctgaagtaccgtagcctggtaagccgtttgatgcctgcctctgcctctgcctctgcctgccagagaggatcacgtgttcgttcccattccagcagtcttaaacgagtgaatgaactactgacgcatctctttctggaatccaggcaagccaggttccgctgtccttcgattagtacggggaaagaagaagaagaagaagcccaggccggagaaccatcgcctgcatttcgatctgtttcaccgcaattcgcattgttagtcgtgtattggagttatgtgtacttggtttccaagaactttggttccttctcgttttttttccttgtttgagcgtttttgggcagcgctggcctggttcctagtatggtgggaattggctgcaccttttgcttcgaataaaaatgcctgctcgttcacctgtcttccagagtgcaatgcgatgttctgttgcccaggtcgtgtggttctgactgatggcgatgttgtgttcttctgttaatcgcctgtttaacgtggtaggctgatgcttcttgttgagaaagcttgctgtgccagacatggctgcttgaatacaagtgaaggaaaaaaaaagccatgccaagtaaagttgcacaaaatttcaactgctcagtggaccactggaccatgttcttggttattgcagttgcagggcttcacatggcgtttggacagcagtcttggattgatgcataaagaggtggtggttaatgaggacgcaaggccgttccctcagagtcagtcacaaggttgcagagctcacggttctcttccctttccgcttcctgtcacatcggaattgttgtttacgccatctgcccatcacccaccaagtctatgtttctgtactggatctttcaatggcggaacgcgcttagttcttcgtcacagtcgaatcacatgatctaatcgatgtctttaatctcgctgtaaaaagggtgggacggtgggtgcagggtagggaccagggaaggcctgcctaaacgtatccataaacatgcacagcaaccctaagatattatactgcctacttcctaagatatagttatttctagtctattttttttccgtccacatccaaataagtgataatatatagacatacatatatatactatattcatcatagattaatgaacgaatgtatacttagtttaaacctaattatattttaggaaggatggagtatgaaacatgacaatacaacaaaaaaaaatcatgtaattgcatatcgtcaaagttatctgaagtaaccaatccagggggaaatcccgttagcaaacatacaagagcaccgccccactacatcccagaaaataaaacaaaaccagaactcagatggataaataatactaccaaatagggcttggaatttagaagctctgtttgtacttgaatatgctgcattaaatacagaaaaaggttccactttccca

SEQ ID NO: 736 - protein, 802 aa, Zea mays
MAAKLTRLHSLRERLGATFSSHPNELIALFSRYVHQGKGMLQRHQLLAEFDALFDSDKEKYAPFEDILRAAQEAIVLPPWVALAIRPRPGVWDYIRVNVSELAVEELSVSEYLAFKEQLVDGQSNSNFVLELDFEPFNASFPRPSMSKSIGNGVQFLNRHLSSKLFQDKESLYPLLNFLKAHNYKGTTMMLNDRIQSLRGLQSSLRKAEEYLLSVPQDTPYSEFNHRFQELGLEKGWGDTAKRVLDTLHLLLDLLEAPDPANLEKFLGTIPMMFNVVILSPHGYFAQSNVLGYPDTGGQVVYILDQVRALENEMLLRIKQQGLDITPKILIVTRLLPDAAGTTCGQRLEKVIGTEHTDIIRVPFRNENGILRKWISRFDVWPYLETYTEDVSSEIMKEMQAKPDLIIGNYSDGNLVATLLAHKLGVTQCTIAHALEKTKYPNSDIYLDKFDSQYHFSCQFTADLIAMNHTDFIITSTFQEIAGSKDTVGQYESHIAFTLPGLYRVVHGIDVFDPKFNIVSPGADMSVYYPYTETDKRLTAFHPEIEELIYSDVENSEHKFVLKDKKKPIIFSMARLDRVKNMTGLVEMYGKNARLRELANLVIVAGDHGKESKDREEQAEFKKMYSLIDEYKLKGHIRWISAQMNRVRNGELYRYICDTKGAFVQPAFYEAFGLTVIESMTCGLPTIATCHGGPAEIIVDGVSGLHIDPYHSDKAADILVNFFDKCKADPSYWDKISQGGLQRIYEKYTWKLYSERLMTLTGVYGFWKYVSNLERRETRRYIEMFYALKYRSLASQVPLSFD

SEQ ID NO: 737 - DNA, 2573 bp, Zea mays
caatgacagagagggtggtgcgaccatttaaagctcgaatgccgctaggggtgctcagggttaaatgatcaggcatcagggaggaaaggaagggataaaatttctttactctagttgtggggtgatggggacaagggcagtgctcaagcaagggagggcgagttcagcgcagagatgcctgtcgtgacacgtggggggtgggagtgggaggttgaggttaacaggtggggttatggcgtcagcgagagagagagcgactgagggggagagaagtgccaacaggtggggacgaggtgtcagtgactcacgggcacatgttagtggtaagtgaggtcgggaatggtttgggctgagtggatctaggctggctcggacactgtgctgattcttttatttttctccatttcccaatttaagtttgaatttttaattcaaatcaaatgaactccaaatctctccaaaaattacaaaaatctagaatatttagatgaatatgttggtggagtttgggctccgcttttggttagtatgtttgtataaaaataatttctctccttttgtcacttccaatattgacttaaatttttatgtagcaatgccaactttttttagtagtgtgccacttatagcacaaaaactatatccattttctaataatccttgaaatccacattctatttttagccattcttcaaaattggcacaaaactaggaaaatttaatacattcttgccataacatattctagtgcaaatgttaactagattgctcaatattagcaaacttcttttggaagattcattaatattgctacattgcatacttttttagaagttcatcaataatgcctcattatcatacttcattttaggaacttgattaaaaccgccttaaaatagagccaagtgacggatccactttaaaggtgattcttaatttcttacttcctatctttggtggcttatgtttatatatgtgtgggtggttgaatgatgttcctacaccactacaccacaccttggacatatatatggaaaatagcttcacagtctagattccatggcatcaaggatggggatggtggctattctgtccttgtttgtttgtgctcttgttgcttcaacatctgtcaatgctaatgtgtggcagactgatgaggatgctttttatagtacaaataaactgggagtcaatggcaacatggagatggcacaacaacaaggtggatttattggccatcgcccaagacttgcattattcaatagggcatcaaaacaactggaccgtgaaaaaagacctgtgcctagcgggccagaccccatacatcacagcatcccatcacatgctcctcagcatccaccatcatatggcaaagctccttatgaagatgacaagagcatagcatctcctggtctgtccaacccgataggtcctccaccatttttagatagatactagttcatgcaaaagtagtgagtatttatgcacctatgccaatgaataacctctaattacctacatgtattggcctggtgtttggtaaacatgaagcaataactttctcttatcgaaatactggtctcaactccgcctatgttgtctcagcatatgttagtgcagcatagtctggccctaagtctaggtactaggaggagggttgagttaggcacggtgagctagctataaaaaacttagccactccaatggagatgaaacccaataaaacagttggaggtgtaaaccccatagagacgcgctataccggaatccacgtatggtgttaaatgggcaagggccgagctgccaccccttggtggcgcaccgtgtcttgatatggatgcagtgtcaagtaagcaaggaatgggtcgtctcttcctttgtggcgcactacatcgacgtcttggtgtagtgacaaatgtgcaagtgtaacaccctaaaatcttaacttgtgatttaaataaatcatttaaaaaagtatctataataataataatcatcaagataaagtacccttgaggaataattaaactttagaatccaccctttataaagtgattggtcataataaaataatgttagctaaatcatatcttgataacgatttagacatttgaaaatgttttctattaaaacaaaggaatcataaattaaaatttgaattcaaattataaatgagaatgtaaaacataaaatgagtaaaaagaaatgaattttgattaagtcaattaccctctccataattaaataataggaagaaagataaataataaaaatgcaaacagtagtagtattattcagattagaatcatgtcagacatttggaaacctaaaattcaaaacaagaaattaaaatttagtttgaatctttaaatttggaaatagaaaagaatagaaaagaaaaataaaaagggaaatcacccgtattgggccgtgcgactggaattcggcccaagttcgtatcagcccagcggtctcactctcaccagccggtgggacccgcaagtcagccaccccacgcgcgctatagcatcaccgacatgtggacccgaccgccagtcgccctaccgcgctcg

SEQ ID NO: 738 - protein, 128 aa, Zea mays
MGMVAILSLFVCALVASTSVNANVWQTDEDAFYSTNKLGVNGNMEMAQQQGGFIGHRPRLALFNRASKQLDREKRPVPSGPDPIHHSIPSHAPQHPPSYGKAPYEDDKSIASPGLSNPIGPPPFLDRY

SEQ ID NO: 739 - DNA, 2898 bp, Zea mays
gtaacagaaccgatgaacacaaagacatgatttggatcgcgagcaccgcacctggtaccctccacctctcacgaagtatcaaattatcactggaattcaggattcaggttacaaaggaagagtcctccctttctgaacgcagtcggcctcaacttatgccccaagccgccctttgctgttcataaagtccttttctttataccacatgccaaaacaaaaagaaaacgcttaaacactcattgggtccaatctggcccatggacacgagagttgggcttcacttgacatcgaaccctcctagtagccatggttccttcccgccttctgttgatttcctccggtgtcgttacatatcgctggaccacattctagacgtccatacaccgaatatacaggaaagagagacaacggggtgaaccgttggacacggcctggaaacaacagtggcggctggaaacaacagcagcgactgtgacaacgactaaatagggttgaaccgcctttgccaatgattttttttgccgtttaccctttgccgagtttgacactctgcaaaaggtttactgtgtgcatttctggctttgccgagtgcatggggcactcggcaaagcatgtgactctggtagtgtgtatgctatgtagacgtacctccaagcttaggtatgtttcttcttagcatttatggattaaggtctaatatcttcttattagattgcaaaataattagtagtggaagaacaacaattgcaaatatgttggctgtgtttgtatgactaaacaactatgatcacatcataacaacaacaatatatgataatatctatatctataaatatatctatatgtaaagtttctatatctccatcattatctataactatatctacatgtaaaatttctatatctctatatctataactatatctacatgtgaaatttctattctctatctctatatttgtatctatagctagatcttctggcacaaacgagatgtgctagagatggattcgtcttctatataagtgagatcgaagacggagattagaacaaacagagcatatattccctcttcactagctcgtggtaataagggaagcttgatcatctttccttatggcggtgatgaagagcagcacaatcgtcgcgcttctattggctgttgccattctgtcctcactgtctccatgctacgaagccggcggctgtaggcgccttcgatctctacttctaagggcatgtacagtggtgtttaatgtgggggctcttaaggtgttttagggggttatttgcaaaaaaatcttagagccgtctctccgtgaagagacgcatctggctcgtaaaccaagtaacaacagacgtctcacttcccactgtacgaatttgtcgtctgttctatcgatctgatgctatacaaatacatttaattctgtatttattaatagactacgtttatagacactccattgtacaatagagtctcttagttgtctcctgtgcttggagaaccgtttttgtgtctctccactatacatgccctaattacttacgcaatagttactatttcgttctaagagccggcgataattatctattaattaaccggccgatctcgtttggactgcgatgtgtgtgcaggcatcgggaaacccaagaagtcaccgccgccgccgagaaggccatacttctcgtcctattccgaggaccaccagaactgccgcttgatctgtagctccaagggtttcaaggacggtggctggtgtgacgaaagcgtggagcacaaagtgtgctgctgctcccattagaaatataatagcgtatgttatgttgatgcatatatatatgcatcgtccatctacctgtgtggtgcaaaattctgaataaaatctggcttttttccggatgtcctgaaacgaaacgtggcaaattatatggagcaaaaggtttaggaaaaaagaaacgtaagatgtcaaaggaacacactgcacctacgtacattgccattattattattattattattattattattattattattattattattattattattattattattattattattattattattatggaactaaaacagcgtaaaaaaaggttgaaaaaaatggtacagatcttgcacttctcaaaatggagctgtcaaatgcttctctgagatccaattagtgtatttcttattccctgaatagagcaatatgcatctctgaatttgcagtagtgtatcccttcttgcctgataggttctatccaatcttgaaaattgaattttctatggtgtagtcgtaactgaagtgtctgtgcaagcatgatgaattttatttaggtgtgttttggtcggtaacactttgatgtgtcaaaatcattgacttggtgctgatagtgtatgttctgcacctactagaatatgagatgcatcctttacggtagtgttaggtacatgtgtgttctggcgactttagtaagagtaggtcttaccggcagcctcacattacttagataatattattggtggcatttttataacttactaactcactcacatttcttagacattactaatgccaatacaatgacaaaaatattttatcttaagagtttacaagttgtgcattttggacagttagacagttatgcattttatttttcttaaacaatctcaattatttttcttggacagataggcagtcatgtaatcatgtttcttttgacatattattttgcttgcttgattcactctagagttgcatgttcagcaagagcaccgatagatcaatgatattttctccatcgcttctaactacttctggtttcttgtattgtaataagggcgaagaatatattctagaggtttcaccaggatcaggaaccaggaatctgata

SEQ ID NO: 740 - protein, 89 aa, Zea mays
MAVMKSSTIVALLLAVAILSSLSPCYEAGGCIGKPKKSPPPPRRPYFSSYSEDHQKDHQNCRLICSSKGFKDGGWCDESVEHKVCCCSH

SEQ ID NO: 741 - DNA, 2580 bp, Zea mays
cggccaggggccagacggtccgcgacctggtgcagggctcgggttccctgtctgacgagacggacggtccgcgccaagaggccggacggtccgcgcgtgcacaggggcggcagagttcgtcggcggcgtctgaatctcgctccggggagggaccccgtcaggagagatcctaggcttcgtctagggtcggcaggccaccctagacacctctaatcaacgtagagccgaagagaagcgaagaatttgggggtagagaaaggctaatctagagctaaactagaactattcctaatgcataagtaaaacgagaaatagacttgatttgatcgattgttgggggttcaatcggccgtagcccttcatctatataaaggggaggtctggatccgctataagttgtttcccgagctaatcccataattttaggtaacaaatcccgcgagaaactcataaccttaactgactctagccgacgtaaattatcgaatttccttgtagtatctgtccctaagaatgaaaatacctttataagatggcaaggaccaacattgttctagaaaagaaaaatcaggaaaagagagggcattgtattgcccacgggaacatgcaaccgaggtaatgatattcatgaggtgtttggttccattgaactaaagtttagtatgtgccacttcgaatgttccaatgataattgtgagtgttaaatatagtttaaatataaaaactaattatacagataagactaaaggcgagacaattttattaaacctaattagtttgtatttaattctcatagttgatataactagataggtaggcacatatatagagagatagatataaatagatataaataagtagatagatagatagatagatagatagatagatagatagagatagatagatagatggactggtagatagattaagagacatggagatagatagacacggatagatgtttagtatataaagcaggcgtggtgatatcaaacacatcaacacatttttggtattagactattgtagctcatatcatctgtcacccatggcgaagtgcagcagcttccaaggattattctggttgctttccatgattcttctagcatcctttgttgctcatgcacgcacaacaagtggtaatcaatgaattattaggcccattttcttttgtggtaaataggtatatcaatttatttagtgttccttaaattaatctgatggagttgcacgtgattgatcttattagggcacaccaaagaggacagcaatgctaggaacatgacgatgaccaagacgagggcatcgggcaacatacttgttagccgtaatgacgacgggccatgctatctagattccggtcttaatgagtacgtctgcagaaagactaataagtgctataagagcttggtgctctgcgtggcgagttgtcaaccatcatcatgaattcatgatactgcggagacatcatgatactgcggagacagacggcgagagatgaggctagctagatgctgtttcaccaaaatattatgtaacacccaaatctcccattttaagaaataaataagattttcgaaaagattatttgaattggagtgctcttacatatcgattaattatgcatttaatatattttcctaaaatgatcaattgggcaaaagaatatatttgtgatgtgcactgcattctggagcatggtttattactgtttgaatttgaattcggatttgaatcatttgaattctcattggatttgaattggaaactaaaaagaaaaaataaaaagaaaaatgcctacgtgtggctccctctctggtgtgtgggccgcttcctcggccggcccacttccacaccggcagctcacgcctaggggtaaaaacggtcgaaaacgatcggtaaacactaaaatcaattttcttttcatattttttctcagaaataagatcgaaaacggtaactccgaaaacgaaaacgacatcggtaatttggaaacatcagaaacgaaagttcggtacgaaaattacaccggttacaatcgaaatcttaaattcgatcggtaaaaactgtaacgtgtaccctcaattgactttaaaaattcacgcaagtcatacattcatatgaaattagtaataacatataaggtaggaggtcacattaaatatataagttgagaagtatataaaccattattatgtatttaagtaaactagaatcaagatgtgtataatgatatgacacttacattctatttgtactactacttggcatagtaaatataattagtgtcctcttggtccttattaagttatcgtgcaaattatgaatatatgtatcaatagtaataacaggtaagaaaatataaataaaatttataaaagtttcaaatgattctaaactatataccattaaatagatcttgattttaggaaaataataaaattagtttcatatttttctaagctaacatgaatttgttatgaatttataaaggatagtacagatttaatatttttctgaacaacaccgaatttattaccgacggtaaaataccgaataaaaacaataattttcgga

SEQ ID NO: 742 - protein, 95 aa, Zea mays
MAKCSSFQGLFWLLSMILLASFVAHARTTSGHTKEDSNARNMTMTKTRASGNILVSRNDDGPCYLDSGLNEYVCRKTNKCYKSLVLCVASCQPSS

SEQ ID NO: 743 - DNA, 5112 bp, Zea mays
gtagcactctgctacaccccccattgtacacctggatcctctccttacgcctataaaaggaaggaccagggccctcttggagagggttggccgcgcggggacgaggacgagacaggcgctcgcctggagccgctcgctccctctcccgcgtggacgcttgtaaccccctactgcaagcgcacccgaccggggcgcgggacgaacatgaaggccgcgggattcccacctctctcacgccggtctccggccgcctcgctctccccccttcgcgctcgccctcgcgctcgacccatctgggctggggcacgcggcgacactcactcgtcggcccagggaccccccggtctcgaaacgtcgacacatttaatgcttaatctaacaataattacttttatatatttgatcgaactttaaaagatttggctcctcagaaagatagacgatgtgcatttattttagaaatgataggatatatttaaggcgacatatggaatagacaggttgggatggagtagatatatatagattcatacgactaaagttgtgttcagcagatcatatatatagctatgcaaaacactattttacactgtagatagcaatatttatgttgtttagagagtgaattttgaaataagaggtgagatagagaatgtgatatggcagctaagagctagttttcaacaagtttgtttctataatagtatagctagatagacagacacgtagctaaaatggtcaactgaccttcgtacaaaaaaaaactttaatccagagatatagcaatatatgcttataactccagacctcagagtcaacccacagatttttgtatattcgtcaaaaagatccacagatttgtggtagagagtatgttttagtagtagtggtatatctcccttgtgggacgacgaagcagccggtcagccggcgctccggccggccggccggcctgcgcctgcacagtacaaatagcaccccccgtcctccagttggctgcatccttctagcttcgatctctatatacctctgtatgtgagtgaggccaatgagagccctcgtagtcgtaagtttcgcttcggcgtgcttgctgctgctgttgcagctcgcaggagcgtcgcatgtcgtctacaactacaaggacctcgaagccgaggctgctgcggcgacggaccaggtgccgccgtccatcgtcaaccccctgctcaggacggggtaccacttccagccccccaagaactggatcaatggtaatgtaaagctactaactaatccaccacccaacgtcgtttgaaggtgatgtgtgtgttaagcatctcctgaaatatataagagagcgaggctagtaatcggcttgttgttcagggttttggtttaccacttgtagcctcaactaataaagctatatatatgagagcgacgagagagaagagacaaaacattcatgagtatggtcagacagactagctagctagacacggcagagaaattacgagagttaaaaaaaatgcgcttgaagggtgaaccaaaacaaaacaactttagtactatgcgtcaacaaagctgtgttcatgtgtcagctagcactagagtcatagtgcgtggccagtgagctgttgtctagcaaccaacgcgaactgaagtttgagagcgtactcgtgttctcgatctcttgcagcgcaaaggtcttcgtacgtgatcaggaatattgcaccatttactgcttaattaattaagtacgtacgtactgtacgtttggctctacctcatcttctaatcttttcggtgctgtcttgtgctctctcggctctgattgcatcgatcggcggcggcgtgaactttgcaacggcggcagatcccaacggtaataagtcgttttccccaccctttttatttcctctaataatgcatcaatattccaactgggtgcatatgcatgcgcgcagcgcccatgtactacaaggggtggtaccatttcttctaccaatacaatcccaagggcgccgtatggggcaacatcgtgtgggcgcactcggtgtcgcgagacctcatcaactgggtggcgctagagccggcgctcagaccaagcatcccgggcgacaggtacggctgctggtccgggtcggcgacggtgctgcccgacggcggcggcccggtgatcatgtacacgggcgtggaccacccggacatcaactaccaggtccagaacgtggcgtacccgaagaacgtgtcggacccgctgctccgggagtgggtgaagccctcgcacaaccccgtcatcgtccccgagggcggcatcaacgcgacgcagttccgcgacccgaccacggcctggcgcggccccggccccgagcagtggcggctgctcgtgggcagcgcggcggggtcgtcgccccgcggcgtggcgtacgtgtaccgcagccgcgacttccggcggtggaggcgggtgcggcggccgctgcactcggcggccacggggatgtgggagtgccccgacttctacccggtgagcaagggcggcgcgccgcgcgcggggctcgagacgtccgtgccgcccggcccaagggtgaagcacgtgctcaagaacagcctcgacctccggcggtacgactactacaccgtgggcacgtaccacccgagggccgagcggtacgtgccggacgaccccgccggcgacgagcaccgcctgcgctacgactacggcaacttctacgcgtccaagacgttctacgacccggccaagcggcgccgcatcctgtggggctgggctaacgagtccgactccgccgccgacgatgtggccaaaggctgggctggaatccaggtgcgtgcgtgcatgcctgcgctagctcggctgttcatccatacgtatatgactgcactgcacggttgtcacgttgactcctttcaacgacgatgatatgacaggcgattccaaggacggtgtggctggaccccagcgggaagcagctgctgcagtggcctatcgaggaggtggaggcgctgagagaaaagtcggtcactctcaagaacaggttaatcaaggcaggacatcacgtcgaggtgaccgggatacaaacggcacaggtacgtacgtacgcgtctactttttttttttttgttcctttgcgtggccacagaactacaccgagcttcctgttcgcctgcatgcaggctgacgtggaggtgagcttcgaggtgtcgccggcggccctggccggtgccgagacgctggacccggcgctggcctacgacgcggagaagctgtgcggcgtgaagcgcgcggacgtgaggggcggcgtggggccgttcgggctgtgggtgctggcctccgccaaccgcaaggagagaaccgccgtgttcttcagggtgttcaagcccgccgccggcagcgacaagcccgtggtgctcatgtgcaccgaccctaccaagtaagtgctagcgctgtagctgagcgcaaaccagcagcaaaagcccgtggtcgtccatgcacactgacttgtgttttttttttgttgctcgcacaactgcaggtcgtccctgaacccgaacctgtaccgcccgacatttgcaggatttgtcgacacggacatctcgaacggcaagatatccctgagaagcctggtacgcgtagcagtacaacaagttttttttttcgtgcaacaactccgccgcgtttacgacgttttcattctcagcgctgtgtcggctcgttacttcttcttcctgctgcagatcgaccggtcggtcgttgagagcttcggagccgggggcaagacctgcatcctctccagggtctacccgtcgctggccatcggcaaggacgctcgcctctacgtgttcaacaacgggagggcgcacgtcaaggtgtcccgtctcaccgcgtgggagatgaagaagccggtcatgaacggggcctgaagatcttgaataaatatatcacccatgcatgacatagtggcgcctgaggaatctttcctttttttaaaaaacatattttagatgtcgtttattaagagttgattgtccatactaaagggcgccccgttatatgttacaatggtaccagctgcacttctagtaacaaagacaaattgactatttgttgttcacttgcaccgttgcacaatatttaaagtacttttcaatttcagatgcctacagaaaaacacaaagttctaataaagtacatctcggactcataaaggatatgtgaaataatattatgactagtgttcgaacaaatggtggagacaactctgacgactttccaattagaataggacatcgaagatcaagtttgagccccttacctttttttctttgataatagataatgtcacaagggacataaaatgagatatcatttggtgtatgccttttgcatacgtgaatgctagttgataaaagtccgtcagaagtaatttggaagctagagttacggtaggatactctagagtccaaagaatttatacttagtagaactaaagctgaatctatgagatgtaacttcgtcactactacatataaggaaggagatgtaagtttggaacgtcaagtagtgtctaaaaagattttttttaaaaaaaaaaataggatcaatgctacaaatagacaaatattatgataaaaatattaaacatagaatcaaagaaggatgaataaagctatccatgaaaataagcatattcaagctatccattcaaaaacaaaagggagacgatgggctttttcgttgtccatttagctctcgcttgcgactagattatccaagcattcgatcctccgaaaatattaattatccagctttatagttttttcaatatccgcagcatatccagatttcttatctggatagaatagttcggatataagatatggatatgggatgaccgatatccatcatatttcggatatctttccgtatattcggatatattttttcgaatggttgtgcgcattttgaagattttttaataaaaaaattaataatacacaaatagtctcaagaattcataacattttatagaggcgtaacatatatccatatattttcctaaaaaatgtttggaccctaaaatccataagatgccatcgtttttccatttcact

SEQ ID NO: 744 - protein, 593 aa, Zea mays
MRALVVVSFASACLLLLLQLAGASHVVYNYKDLEAEAAAATDQVPPSIVNPLLRTGYHFQPPKNWINDPNAPMYYKGWYHFFYQYNPKGAVWGNIVWAHSVSRDLINWVALEPALRPSIPGDRYGCWSGSATVLPDGGGPVIMYTGVDHPDINYQVQNVAYPKNVSDPLLREWVKPSHNPVIVPEGGINATQFRDPTTAWRGPGPEQWRLLVGSAAGSSPRGVAYVYRSRDFRRWRRVRRPLHSAATGMWECPDFYPVSKGGAPRAGLETSVPPGPRVKHVLKNSLDLRRYDYYTVGTYHPRAERYVPDDPAGDEHRLRYDYGNFYASKTFYDPAKRRRILWGWANESDSAADDVAKGWAGIQAIPRTVWLDPSGKQLLQWPIEEVEALREKSVTLKNRLIKAGHHVEVTGIQTAQADVEVSFEVSPAALAGAETLDPALAYDAEKLCGVKRADVRGGVGPFGLWVLASANRKERTAVFFRVFKPAAGSDKPVVLMCTDPTKSSLNPNLYRPTFAGFVDTDISNGKISLRSLIDRSVVESFGAGGKTCILSRVYPSLAIGKDARLYVFNNGRAHVKVSRLTAWEMKKPVMNGA

SEQ ID NO: 745 - DNA, 13562 bp, Zea mays
ctcaaggattttgactttgtgttccacttgcaattaatgttgcttattttaggacatgcaaattctttgtccttatcattgcagaggaaagataaaaacatcttggaggccatgttagaggtgaaattaataaagcagaaattttagcaaattagggatgatggttgggattctttgttgcaggctgtacacaccttttgtgaagaacatggcattcctaagttggatatggatgatgactatattgatcgccataagccaagaaaaagactaaccgcacaaactaccagcattatagatatgattgcttgaacccaattattgacttatagcttacagagtttaatgatcgtttcaatgaggtaaactctcagttgcttactcagattgctgctttcaaccccaagaattcttttgaggctttcaaagttgagagtttggtagagttggctaagtcataccctgatgattttgattcaacacaaatgaaggatcttcatcgtgagcttaacttttttattgataatgtgcgagccgatgaaagattttctagcttgatctctatttctgtgcttgcaaagttgatggtggatgcaacaaaacatatggctttttcctttggtctatcgacttctcaagcttgtattggttcttccaatcgccactgcatcagtggagaggtgcttttcagcaatgaaaattgtgaagacgatgttgagaaatcgtattagagatagatttatgaatgattgtatcatatgcttcgtggaatcaggatttctagccacaattccaattgatgatgtgatagttcgcttccataagatggaggaccgtaaccgtactaccgtagagaaaaaatataaaaggtatacaattattttgtaaaatcttattttgtcataatatggtgcttattattttataaattattgatgttgtgtatggtattatatttctcaagctataagttagtgttagtatggatccggtaaaaattatcctggcttcgcccctcgatctggaggctggtggccgctggcgcagcgtacgcaaggcagcatccgacggcgagctcgtcgcgaggttctacttcacctacggcgggcgcagcgtggtgatcgggccaccgcgtgcgtgctgtgtgcgccggagtttctggacatggcggcggcggcacaccatcgtggacgccgtgaagtgcaagcgcctgcttccgctcgcgggctccaccgacgaggtcgacagctggggcatcgccgtcgaggacagcgcgagcgtggagtcgttgagcacgaggtggacggggcatgccgagctgctccgcggcaccgtgcgctccaatagccgaccacgctttcgagctcttcaaggattgatcatccgcaacctgcctcagcaatcggagtgttgaggtgctcgcgaccgccgcgcgcgtgcatgccatccacgaggcgtagtagcccctgacgctgcaggtttgtctgtgactcacacacgcacgccatatgtttgttctaatgctctagtgcagcagtgttgcgaatgcctaactgcaaaagcaccaagtcaatcagcgtgggatcacctgaatttaatgttctttttagccatcatatgcaccatgatgttgtgcttgccattaagatcggggaacgtatccggtgttcaaaggggtacggtggtcacgtgtacattttaaatttggaacgtcgatccaacatctaacagaagcaccaattttacaaagaacccctttcaccttcctcacttggtgggacggttcttaatcaaattaactgcagccgctggtatacatgtacatgtgggcccgcctagcccggcacggcacaggcccacaaaaacacggtccacaaaagcacgacccacaaaagcacatatctaattatgggccgtgccgtgccagcacgtgtgcccagtcatcggcccacaattagttatgtgtgccaggccgacccaaatagcccaaaataccttaatatgccagaccggctcatatacatacaacagtaatacatcaacaaaacgtataaaatatatatatgaccaaaataaaactaagatgttttgtggatgcacattataaacctttggtcagaaagaaaaaaatattacaactagctcacaaaaaatatccagttctctgtttagtgtttaattgagtactatacatccatacagaataaatatacaatgatcatcatcactattcactatccatatctaggtattggttctcgatggcttattaaagctctagattctccaagttatgctagtcatgtgggctttgacagaccttagttaaatactgagtctatattttgtgggccttagttaaatgggtcgtggcaggccggcccgtgggcttgacttgaggcccaggcacggcccacaatgtgggccgtgccggcccatgcccacaattaggttgggcagtgccagatatgggccgtgccagaaattgtgtgctttgggccggcctattaggcacaacataaatgtacacctatagccgcatagccgctggatgtgagatgaatgtctcagatttaaaatgtgcacttgagcaccgtacctctttgaacaacagatatgttcctttaagattgatggtggaaaaaaattagtcagtacctcactgtatggcggcattgtttgattatttcagttcgcacccgttggaccttgctcattaaaaaagtttataccatggagtctttgcatgtagttgtgtagtaggggaagagtggcataggaggaatcacaacttcagctagcttctctagccttagggtatttttgtctttttgcagttcggtcttttcgcagccctgcgctgccccccctgtccgcctgtccctagacctgttttgcgtcggcggggaagacagttgacaggaaggacacgatcttcgtgtccgatgccgatcttcatgcgagcagcgagccactacgttgcgctgccagtgtcggctatggtatccaggcattcgttgtgcacgttgacgatgagctcgaagccggtccgggtgaacgcgagcagcacggtgaggtcaacgtcgtacatccgcacgtcgatgctgaggccagccagcagcggcatgacagattgcggcgtcaggagattgtgccagtaggtggcggggctgggggcagaccggcaggcgaggcctatgggcgggcagtgctgtgagttagagcagtgtggcaatgttggtggtagtggtgacacccttcgggagcggaaggaggctggaacttcaggtcagttctattgccataaataaataaaataaaataaatgaggctcaaaattccaaaatgtcatttcagcgtgtgcaccgcttcataaggccagtctcgtgaatcctacaagtttgatggtattctgggcctcgggcatagcccatttatcataaataaggacaattttgtaattctctccttttctttttgtttgcttgtatttgtatttcacatgggactcacttatgttgatgtattttagcttgtaaaaaagagtaaaaacattattcagtgaagtgacgcattgagttcatgattaagtttcaattatcctttttaataggtccatgccacgcttgtataaggattgagtaaaaaaactaactttattacaccacagtagataacaataagtcatatcagttgcatcacacaagcacactatttacttcttgtttttggatcaattctttggtgtctgtaaacccatacaacataacttgaatatgaacagcactgcagggataattgaaacctaggagtaaataaaatggatgtgaacgtttcagattatttggcattctgtaaaagacccaacacccaaatgcttgaaaaaatatatcatgttgtaaaaattcgatctgcatttccttctgtaagcaataaaacatggctcttttaagaattaccttgacaaaaaggtaaaatataatatcaataataactccggataggaaaaacttattcttctgcttataattatatcttaaatttaagtctatgacaatgtgaaatatttattgctagtgctacattttaatgtgtaatgaaagcactttcttttggacattcgaattctcctttgaaaatgatatactcctgtgattctggtttttaggagaattgcatgcatggcctagtggtagcgttgagataatgagttaagctttttgaagtttctaatgtgaattgtttttcttttaacttaaatactcattcagcgaaagatcctctagcgtaatgggtaaggattccgagtatcaccttcaggttctgggttcgaccctcatcgggggcgaatttcgggcttggttaaaaaaaatactctcactatgccccgcccgctcccgggttacgttctgtgcgccaccctctggctgagctgttgtaaagtgggcgatgacggcccgctagtgatggggggcaggggtggacccaagtacggctgagtgagggcacatgcccccgcccatttctttgttctaagtactagggtctaaattttcaccgtgagcccccctgcttagtctaatttagatgcccttgctctggtattttgatgctcgtccttacaagtatgcccttagtcatattttgtcctgggtccgcccttgatgagaggggccagggtttagagattttctcggccgggaccaatgttccggtctcttcttaatatagtaccgggacagtctttccctctccggccgagttttttatactcactctaggtgcaaacgtaagttgttcaggcttgtgcttaaggattaagaaagtaaataaaatgaccatgttacactttttttatttataccgtatcgggaaagataaaccatttatctgtgagtggtagcatggtcaaggagaaaaaaatagatgcatagaggttctgggacgactcacatttagagcatagttgaaaaggctaaaacaaccaggagggggtggggtcgggatacataaattttcatgagtgatggttgaactattgagggtgcaaaataattttttcaacaaataatgtggtgaaatacctaagaggggtgcacctagcatagattttttggggctccccttggcctctcctttcttccgccctgaaaacaacctacatggatacatctgcaaccagagggagtatctgatgctttttcctgggcagggagagctatgaggcgtatgtcctcaaagccactttgcattgtgtgaaaccaatatcgatctttgttacttcatcatgcgtgaacatttgtggaaactactagcttacaagcattagtgacagctcagaaaaaagttatctctgaaaggtttcatgtgtaccgtgggaaatgagaaatgttgccaactcaaacaccttcaatatgttgtttgcaggcaaactcttctggaagaaaggtgtctaaaactatgaacgggttacagaaaggtataaaccacggctgtgcattttggaagtatcatctatagatgtctgttgaggggaaagccgtacgccaacgttatttactcagaaacagcttcaacacacagttgtctgctttatgatggcatctccacccaggcacccaccatcacctatctctcgtgcctgtttattttcttgccctttctgatcataaaaaatcattaagagtttgcaaacatgcataggcatatcaatatgctcatttattaatttgctagcagatcatcttcctactctttactttatttattgtttgaaaaatatgtcctgcacctagggagctcgtatacagtaccaatgcatcttcattaaatgtgaatttcagaaaggaagtaggaacctatgagagtatttttcaaaattaattagcggcttctattatgtttatagcaaaggccaagggcaaaattggaacactaatgatggttggttgcatgagtctgtcgattacttgcaagaaatgtgaacctttgtttctgtgcgtgggcataaaacaaacagcttctagcctcttttacggtacttgcacttgcaagaaatgtgaactccttttcatttctgtatgtggacataatgccaaagcatccaggctttttcatggttgttgatgtctttacacagttcatctccaccagtatgccctctcatactctatataaacacatcaacagcatcgcaattagccacaagatcacttcgggaggcaagtgcgatttcgatctcgcagccaccttttttttgttctgttgtaagtatactttcccttaccatctttatctgttagtttaatttgtaattgggaagtattagtggaaagaggatgagatgctatcatctatgtactctgcaaatgcatctgacgttatatgggctgcttcatataatttgaattgctccattcttgccgacaatatattgcaaggtatatgcctagttccatcaaaagttctgttttttcattctaaaagcattttagtggcacgcattttttgtccatgagggaaaggaaatctgttttggttactttgcttgaggtgcattcttcatatgtccagttttatggaagtaataaacttcagtttggtcataagatgtcatattaaagggcaaacatatattcaatgttcaattcatcgtaaatgttccctttttgtaaaagattgcatactcatttatttgagttgcaggtgtatctagtagttggaggagatatgcagtttgcacttgcattggacacgaactcaggtcctcaccagataagatcttgtgagggtgatgggattgacaggttggaaaaattaagtattgggggcagaaagcaggagaaagctttgagaaataggtgctttggtggtagagttgctgcaactacacaatgtattcttacctcagatgcttgtcctgaaactcttgtaagtatccacctcaattattactcttacatgttggtttactttacgtttgtcttttcaagggaaatttactgtattttttgggttttgtgggagttctatacttctgttggactggttattgtaaagatttgttcaaatagggtcatctaataattgtttgaaatctgggaactgtggtttcactgcgttcaggaaaaagtgaattcttggttactgcatgaataacttatggaaatagaccttagagttgctgcatgattatcacaaatcattgctacgatatcttataatagttctttcgacctcgcattacatatataactgcaactcgtagttgcgttcaaaaaaaaatgcaactcttagaacgctcaccagtgtaatctttcctgaattgttatttaatggcatgtatgcactacttgtatacttatctaggattaagtaatctaactctaggccccatatttgcagcattctcaaacacagtcctctaggaaaaattatgctgatgcaaaccgtgtatctgctatcattttgggcggaggcactggatctcagctctttcctctgacaagcacaagagctacgcctgctgtaagggataacactgaacatccaacgttgattactctattatagtattatacagactgtacttttcgaatttatcttagttttctacaatatttagtggattcttctcattttcaagatacacaattgatccataatcgaagtggtatgtaagacagtgagttaaaagattatattttttgggagacttccagtcaaattttcttagaagtttttttggtccagatgttcataaagtcgccgctttcatactttttttaattttttaattggtgcactattaggtacctgttggaggatgttacaggcttattgatatccctatgagtaactgcttcaacagtggtataaataagatatttgtgatgagtcagttcaattctacttcgcttaaccgccatattcatcgtacataccttgaaggcgggatcaactttgctgatggatctgtacaggtgatttacctcatcttgttgatgtgtaatactgtaattaggagtagatttgtgtggagagaataataaacagatgccgagattcttctctaaaagtctagatccaaaggcattgtggttcaaaacactatggacttctaccatttatgtcattactttgccttaatgttccattgaatggggcaaattattgattctacaagtgtttaattaaaaactaattgttcatcctgcaggtattagcggctacacaaatgcctgaagagccagctggatggttccagggtacagcagactctatcagaaaatttatctgggtactcgaggtagttgatattttctcgtttatgaatgtccattcactcattcctgtagcattgtttctttgtaattttgagttctcctgtatttctttaggattattacagtcacaaatccattgacaacattgtaatcttgagtggcgatcagctttatcggatgaattacatggaacttgtgcaggtatggtgttctcttgttcctcatgtttcacgtaatgtcctgattttggattaaccaactacttttggcatgcattatttccagaaacatgtcgaggacgatgctgatatcactatatcatgtgctcctgttgatgagaggtaatcagttgtttatatcatcctaatatgaatatgtcatcttgttatccaacacaggatgcatatggtctaatctgctttcctttttttcccttcggaagccgagcttctaaaaatgggctagtgaagattgatcatactggacgtgtacttcaattctttgaaaaaccaaagggtgctgatttgaattctatggttagaaattccttgtgtaatccaattcttttgttttcctttctttcttgagatgaacccctcttttagttatttccatggataacctgtacttgacttattcagaaatgattttctattttgctgtagaatctgacactaaagctaatagctactgatgttgcagagagttgagaccaacttcctgagctatgctatagatgatgcacagaaatatccataccttgcatcaatgggcatttatgtcttcaagaaagatgcacttttagaccttctcaagtaatcactttcctgtgacttttttctatccaactcctagtttaccttctaacagtgtcaattcttaggtcaaaatatattcaattacatgactttggatctgaaatcctcccaagagctgtactagatcatagtgtgcaggtaagtctgatctgtctggagtatgtgttctgtaaactgtaaattcttcatgtcaaaaagttgtttttgtttccagtttccactagtttttatttaccaatgcacgatttatgtattttcgcttccatgcatcatacatactaacaatacattttacgtattgtgttaggcatgcatttttacgggctattgggaggatgttggaacaatcaaatcattctttgatgcaaacttggccctcactgagcaggtactctgtcatgtattctgtactgcatatatattacctggaattcaatgcatagaatgtgttagaccatcttagttccatcctgttttcttcaattagcttatcatttaatagttgttgactagaatctaaacacaaatttacctaatatgtttctctcttcagccttccaagtttgatttttatgatccaaaaacacctttcttcactgcaccccgatgcttgcctccgacgcaattggacaagtgcaaggtatatgtcttaccgagcacaattgttacctgagcaagattttgtgtacttgacttgttctcctccacagatgaaagatgcatttatctcagatggttgcttactgagagaatgcaacatcgagcattctgtgattggagtctgctcacgtgtcagctctggatgtgaactcaaggtacatactctgccaatgtatatgctgatgttttatacattctcttgcataatttgattcgagtcaccacaattagtgtaactgcaatctactcttgagtataccatttcaacaccaggcatcaccaaatcacacagaacaatagcaacgaagccttttagttccaagaaatttagggtagcctagagttgaaatctaacaaaacaaaagtcaaagctctatcacgtggatagttgttttccatgcactcttatttaagctaaatttttgggtatactacatccatttaattattgttttattgcttcttccctttgcctttcccccattactatcgcgtcttaagatcatactacgcactagtgtctttagaggtctctggtggacatgttcaaaccatctcaatcgaatcggtgttggacaagtttttcttgaatttgtgctacacctaacctatcacgtatatcatcgtttcaaacttgatccttcttgtatcatcataaatccaatgcaacatacgcatttctgcaacatttatctgttgaacatgtcatctttttgtaggttaacattatgcaccatacaatgtagcatgtctaatcatcatcctataaaatttacattttagcttatgtggtatcctcttgccacttagaacatcatatgtttgatgccatttcatccaccctgctttgattctatggctaacatcttcattaatatcctcgcctctctgtatcattggtcctaaatatggaaatacattctttctgggcactacttgaccttccaaactaacgtctcctttgatcctttcttgtgtgtagtagtaccgaagtcacatctcatatattcggttttagttctactaagtcccgggttcgatccccctcaggggtaaatttcgggcttggtaaaaaaaatcccctcgctgtgtcccgcccgctctcggggatcgatatcctgcgcgccaccctccggctgggcattgcagagtgggcagttgatcggctcgttagtgatggggagcggggttcaagggttttctcggccgggaccatgtttcggtctcttaatataataccgggagggcagtctttccctccccggtcgagttttagttctaccgagtctaaaacctttggactctagagtcccctgtcacaactcacaactctagttttctatttacttctacctagcgtttattaatgatcactatatcgtctgtaaaaagcatacaccaaggtaatccccttgtatgtcccttgtaatattatccatcacaagaaaaaaaaggtaaggctcaaagttgacttttgatataatcctattctaatcgagaagtcatctgtatcttcgtctcttgttcgaacactagtcacaattttttttgtacatgttcttaatgagtccaacgtaatattccttgatattttgtaagccctcatcaagtcaatgaaaatcacgtgtaggtccttcatttgttccttatactgctccatcacttgtctcattaagaaaatatctctcatagttaaccttttggcatgaaacaaaatcacacagaagttgtttcctttttttaagatcccacacaaaagaggtttgatctaaggaatctggatccctgacaggtttatcaaaatcctttgtgtttttcttaaaactgaatattcctccagcttctagtattgatgtaatattcaatctgtttagcaagtgaacaccttggttcttgttgttactgtacatcccacccacccccccgaggcccagattaccacgacatgaatacaagaatattgaacccagatctagagtttgtttgtactgttgaaaatcggtgacaattcattttgttattgcgctttctgataacgacaggactccgtgatgatgggagcggacacctatgaaactgaagaagaagcttcaaagctactgttagctgggaaggtcccagttggaataggaaggaacacaaagataaggtgagtatggatgtggaaccaccggttagttcccaaaaatatcactcactgatacctgatggtatcctctgattattttcaggaactgtatcattgacatgaatgctaggattgggaagaacgtggtgatcacaaacagtaaggtgagcgagcgcacctacatgggtgcagaatcttgtgtgctcatctatcctaattcggtaattcctatccagcgctagtcttgtgaccatggggcatgggttcgactctgtgacagggcatccaagaggctgatcacccggaagaagggtactacataaggtctggaatcgtggtgatcttgaagaatgcaaccatcaacgatgggtctgtcatatagatcggctgcgtttgcgtctacaaaacaagaacctacaatggtattgcatcgatggatcgtgtaaccttggtatggtaagagccgcttgacaggaagtcgagcgttcgggcgcaagatgcgttgtctggcatgctgttccttgaccatttgtgctgctagtatgtactgttataagctgccctagaagttgcagcaaacctttttatgaacctttgtatttccattacctgctttggatcaactatatctgtcatcctatatattactaaatttttacgtgtttttctaattcggtgctgcttttgggatctggcttcgatgaccgctcgacccttggccattggttcagctctgttccttagagcaactccaaggagtcctaaattttgtatcagatacgaaggacttcagccgtgtatgtcgtcctcaccaaacgctctttttgcatagtgcagggggtgtagacttgtagcccttgtttaaagagaaatttgaatatcaattataagtattaaatatatatttaattaggtttaacaaatttggctcgtttttagtctttatttatgtaattagttttaaaaatagactatatttaatacgaaattatcatttaaacatttgatatgacagagactagattttagctgagtgaaacaataatcactttggtatggataaatgttcccgtggttatccacttgaaaaaccgagggtgttgttgtctctgtcgtcttgtcgggacatgaacacgcgagtttccatgcaggaacctggaatctcatcccatgtagtgcaactaggaatcccattccatgtagtacaaacagaacctagaatccaatgggtcgtctctgagtgagggaacgtccaagtgagtatccatgtacggataagggaggctatatatttaggccctgtttcaatctcacaggataaattttagcttcctgctaaacttcagccatataaattgaagtgctaaagtttagctccttatggtatttggactactctaataaagtttagtacattggaataaaaagacacatatgcccttaatgcggagagagggaatgatgttggagggtatggatgaaaaatgggttcctggcccacgtttagctacttttagcatctcttgagcagtttatgagataatatgtgctaaattttatcacaccatcattagctcttttgtttagatcactaaatggctaaaagtagctaaaaaagttgctaaagtttatctagtgggattgaaacagggccttaataaagatggtgtt

SEQ ID NO: 746 - protein, 516 aa, Zea mays
MQFALALDTNSGPHQIRSCEGDGIDRLEKLSIGGRKQEKALRNRCFGGRVAATTQCILTSDACPETLHSQTQSSRKNYADANRVSAIILGGGTGSQLFPLTSTRATPAVPVGGCYRLIDIPMSNCFNSGINKIFVMSQFNSTSLNRHIHRTYLEGGINFADGSVQVLAATQMPEEPAGWFQGTADSIRKFIWVLEDYYSHKSIDNIVILSGDQLYRMNYMELVQKHVEDDADITISCAPVDESRASKNGLVKIDHTGRVLQFFEKPKGADLNSMRVETNFLSYAIDDAQKYPYLASMGIYVFKKDALLDLLKSKYTQLHDFGSEILPRAVLDHSVQACIFTGYWEDVGTIKSFFDANLALTEQPSKFDFYDPKTPFFTAPRCLPPTQLDKCKMKYAFISDGCLLRECNIEHSVIGVCSRVSSGCELKDSVMMGADTYETEEEASKLLLAGKVPVGIGRNTKIRNCIIDMNARIGKNVVITNSKGIQEADHPEEGYYIRSGIVVILKNATINDGSVI

SEQ ID NO: 747 - DNA, 3935 bp, Zea mays
acacggcatctctttctcaaaggtcgaaccatgtgtgttccatgcatgcgtggaacatgcaaggttgtcacgtatagggaatgatgacacacgagagcgcctacaaggcaacaaacaccttacgtaccacgtagaatgcattttgctaccacctgccaccggatgacatgtatgcatgcatgcgttgtgtacgcatacactgctgtctgctggtgcccaaagaccatctagaacagcatcttttaattctccatttccctcacgccattgctagtgccttgcacatgctcgcactccctaacacatcttcctccctttatttttcgttgccaattgcttgttgttcaaatgccacgttttccttacacagctgtagggcaccgtaccacgtagaatgcattcctcgccaccaacaaacaacacggccgggcatatgtacgtcttacgccggaccatcaccagtatatatgatgctagggatcagtgggcgccctttttgcctcgtcctcccggggcggcattcctatgtcctaactgaagcaacccacgcgccgccatttctgttgcgaatgagtccatggacatatgtgccaacagaacccctcggaaggcaccatctatctatctatctctcaagcaatattatatttggcacctacgctcaagtacatagacagtgtgcacggcattgtgcagctggaaagcccgcccgacacgagggctgccaaatcgacagctccgcgcccttggaaatcctagtcacttgttcacaattgaccaatctacccttgaagcacacggtggatggtactgccacatttggcttataggggcatagaggacaatgaatgcaactggagcgggaaggagagctttaatttgtaagtactcggtgaacacggcacctgatgatgatgatgatggacagcgaggaattgttataaaaggcgcccgtccctcccatggctcaagaacaagggaatcgaagccattccctcttcaagaggggatcatcagattgggcttattattccttattactccaggtaattcttagtttgttgcccttccaaacctttacatctcatataagaatgattattacatgcaagattatgttgacatgcgtcgtcatggtattttttttaggcaaggatcggagttgctctgaattgactgaaccatggcggcgacaatggcagtgacgacgatggtgacgaggagcaaggagagctggtcgtcattgcaggtcccggcggtggcattcccttggaagccacgaggtggcaagaccggcggcctcgagttccctcgccgggcgatgttcgccagcgtcggcctcaacgtgtgcccgggcgtcccagcggggcgcgacccgcgggagcccgatcccaaggtcgtccgggcggccgacaactgcgacatcgcgcgccagcttggcgccgccgttcccgggcagcaggccgcctgggaggcggaggaagaggcagcgaagaggaggaagcagaagggcggcggcagcaagaagcagcagcagctgggcgatctgagcctgaggaaggtcagggtcaagatcgccaacccgcacctgcggcgcctggttagcggcgccatcgccggcgccgtgtccaggacgtttgtggcgccgctggagacgatccggacgcacttgatggtcggcagcatcggcgtcgactccatggccggggtgttccagtggatcatgcagaacgaagggtggaccggcctgttccgcggcaacgccgtcaacgtcctgcgcgtcgctccgagcaaggctatcgaggtacaacccacccatgttctcagaatgttctagaagccatggtggtcgtgctgtgcatcgtcagtgagtactatgccttcctctcatgttttgtttacatggcggtggtggtgcacagcatttcacctatgacacggccaagaagttcctaacccccaagggcgacgagccgcccaagatcccgatccccactccgctggttgccggagctctagccggattcgcctcaaccttgtgcacctaccccatggagctgatcaagaccagggtcaccatcgaggtgagcgacaacaaacacaacagttcgcgaagtttttcaacggtctcactactgacaacacatacatgcatgcatgcgtgcccgcattgcattgtgtgttgtgtgatggcatggcatgcagaaggacgtatacgacaacgtcgcgcacgcgttcgtgaagatcctacgcgacgagggcccgtcggagctgtaccgtgggctgacacccagcctgatcggcgtggtgccgtacgcggcctgtaacttctacgcctacgagacgctgaagcggctctaccgtcgcgcgaccgggcggcgtcccggcgcggacgtgggccccgtggcgacgctgctcatcgggtccgcggcgggcgccatcgccagctcggccacgttcccgctagaggtggcccgcaagcagatgcaggtgggcgctgtgggcgggaggcaggtgtaccagaacgtcctccacgctatctactgcatcctcaagaaggagggcgccggcggcctgtaccgaggtctcggccctagctgcatcaagctcatgcccgccgccggcatcgccttcatgtgctacgaggcgtgcaagaagatcctcgtcgacaaggaggatgaggaggaggaggacgaagccggcggcggagaggatgacaagaaaaaggttgaatgatcaaagttcttggccaagaaggtagcaatgtcgtgaagcgtacgtgaactggaaacggatggacaagtatatttggagtttgatgtggtgtttccggatcgtgtgtttgtctcagatgaaaaaaatacaatattttgagtccaagttaatcaatgttccatttgcctatccggagctcaatttgttaggttgcatgttccatgtaattactatatttgcctatttcaattttcaagctcttttcgttgtgtttagtaaactgtggtgtgaccacttacggtcacaataaccatttttatctgtttttggtataataagcatgtctgtgttcggtcctatactcctatttgggacagctagcgggtggggaccaggtatggattcggatcgaatacgaatgaaaacgaatccgaatgtcactatttaccatattttaattcgaatacaaatacagatactatcggatacgaatacaaaacgaatagttcgaattcggattcatattcggatacttacttgatttggaacatagcatcatagcatatatgaatttattttatcgatggatttatagttgataaaaatcatattacaagcaaattataaacaatagtacatatacattatttaattgaaacttagttgaatatcatattttaaataaattatttatacctagtatatttatattttagtctctaaatataatcttttcgtatattaagtaaatttgtattttggactctaaaaactcgaataatctaatgtattcaaaattatactttttaaatattaattaaaatgtatcattgtatatcactagtaatgtaagattaacacaatcatttatttatgatatgaatattttttaacattttaaatggtgtatatcagttttagtacatttttaaagtttaaaatcgcttgtaattagtaattagtaataaaagtaagtttaaattggttttatcgaatactttttccttttggatacgaatagtatcaaatatttcacagtttttgtcgaatgttgtcgaatacaaatcttaaactggatagagaaaaaacgaattcgggtatgtctatttaacatccatattaaaatcgaatacgaatacggatatccatattagcactttatccgaatacgaataattcgggtctctagacatccgaatccacccctagtggggacgata

SEQ ID NO: 748 - protein, 437 aa, Zea mays
MAATMAVTTMVTRSKESWSSLQVPAVAFPWKPRGGKTGGLEFPRRAMFASVGLNVCPGVPAGRDPREPDPKVVRAADNCDIARQLGAAVPGQQAAWEAEEEAAKRRKQKGGGSKKQQQLGDLSLRKVRVKIANPHLRRLVSGAIAGAVSRTFVAPLETIRTHLMVGSIGVDSMAGVFQWIMQNEGWTGLFRGNAVNVLRVAPSKAIEHFTYDTAKKFLTPKGDEPPKIPIPTPLVAGALAGFASTLCTYPMELIKTRVTIEKDVYDNVAHAFVKILRDEGPSELYRGLTPSLIGVVPYAACNFYAYETLKRLYRRATGRRPGADVGPVATLLIGSAAGAIASSATFPLEVARKQMQVGAVGGRQVYQNVLHAIYCILKKEGAGGLYRGLGPSCIKLMPAAGIAFMCYEACKKILVDKEDEEEEDEAGGGEDDKKKVE

SEQ ID NO: 749 - DNA, 2566 bp, Zea mays
gtgtccagtggctgcagggcagcccctggcgctgttgccctcttcggtggcatgacgaaggcgaacgcttgccaaaggttgtggaagtgagttcaccggaggtgggcgctaatgttggtcacttgttcttaaatgttgtgaattaagaacaaggcaacacaattgttaaaggtataaaaaccttcatcctccgaagcattgcttcctctaggattcaatgatcattggacgaaggtcttgaaggacatgccttcaacatgttatcaataaataaggatacacaaggatagatacaatgattataaatcataagtctattcatatcagcattccataaagtttatatgaacatgaatatttattacattgataccttcgacttgctcgaaggtgttgacacgaaagcaagattacaattcagcgtgaacagtacggtgctactgttcatctatttataggcacggggcgcagcctgggtaaaattacatttatgtccctgacatttacttataaccataacatggatcattaaggactaagcagtctttttccctttcggcttgcatcatctttagtcttcatcactattataagccgaagctattaccccttggctatagcttcggtgttcatctttattatcttcggactatgtcttcaccttgtatacctttgtcttgggggaaaaccttcatcctgaagccgaagctccctgtaataattcatatcatgctaaaaataaatggtcagtcctgtttttgaggaccttcggaagaggaaggccccccaacaagacgattaactagtattgtctcactgcattgtttttttggcacttcatcaataatgcctcaatagcatacttcattttaggaactttattaaaactgtcttaaaatagggccaagtcataaattcacttcaaagtgactcttcatttcttacttcctatctttggtggttttgtatatatatatgttcatggttgagtgatgttcctacaccactacaccacaccttagatatatatacagaaaatagcttcactatctagattccatggcatcaaggatgggaatggtggctattgtgtcactatttgtttgtgctcttgctgcttcaacatcagttaatgctaatgtgtggcagactgatgatataccagttgttaatagcaacatggtgaggcatagcaacatggagaggcaacaacaacaaggtggatttattggccatcgtccaagacttgcatcttttaatagggcatcaaatcaagatggtgatcgaaaaagaactgtgcctagtgggccagaccacatgcatcacagcatcccatcgcatacccctcagcatccaccagtgtatgtccaagctctttatgaagatgatagaagtagaacatcttctggtccatccaaatcgataggccctccaccattatcggatagatactagttcatgcaaaggtatagagtgtttatgcacctacgccaatgaataatctctaactacccacatgtactggcatggtgtttggtaaacatgaagcaataatttcctcttatcgaaatacaggtctcgagctgcatatgaaaaaagataattatgaagcagcaaatcttttcggttgaaaaagtacatctctattattaatggtaacctatatatcaatctacaatgtgtgtgtgtgcatctcgatgcatacattcatcattttatgtttgcaaggtactttaatggcgggaaggattagattattcttgtttcctcttattcttacctttttttcaaaattaccagtttccaatgtctgaatatgcaatgcattataaaccctagtcagcatacatcgagtcaatatataattctatatgttcaagaattgttgctgggtatggcaatgcgacgtgtttttaagctattgggtcgaggattttagtacaggtaaattacatttctcaatcttcaagttgtattttccaactttaaattatggaaccgggtaatgctccactccaatggttgaaagggaaaaaatttggtccccggactaatttcataggtggttctctattttttaaaacaacaaaaatagatttgttctttaaaattgataattaattactcataaattagaaaaaaatatgaaactagttatagttttcttctaaaattattgtatgtttgttggtgctctaggtatagagtttgaactacagctagaggagtaaaatggtgatttaaacaaggtggcgcgaactcaaaactctagcagtaagaaaactttggaccaacaacttgacataatgaagcagtcatgaattcaacaactcaaaaactaagtagcaaagcaaaggctcaaaatgtttttaggtgattttcatatctaaatttatctttgggcaaaagtggactgtaggtaaataaattagaaaggagaagaaaatatcacacagagcaacctgaaatttgataccacttgataagactcaatgggtagaagggagcctgatctttcaatgagaaatggtggacgtcgaaaatttgttggaggccaatgttggtg

SEQ ID NO: 750 - protein, 131 aa, Zea mays
MASRMGMVAIVSLFVCALAASTSVNANVWQTDDIPVVNSNMVRHSNMERQQQQGGFIGHRPRLASFNRASNQDGDRKRTVPSGPDHMHHSIPSHTPQHPPVYVQALYEDDRSRTSSGPSKSIGPPPLSDRY

SEQ ID NO: 751 - DNA, 6473 bp, Zea mays
ccctttcaagaggaacatatatatatgggtacgttaaatgctagtcacagtttatgagatctggttggtctctagatacccatgaaaggctatggagtttgacttatatgcttcaactagaggggatgcgctcggcagtacgatcgacgttacagtaaataaagattgatgatgagtagcacagtcgacagtacgatcaatagttgatgtggcgatcgacaagacactggttcactggaaccagcataagatagttgataacctttctaagtcagcaggtcgtgcatatggtcgtataaacactatttgcactgtaaatagcaacgtgataggggatgaaataggagagttgatggagataacatacgagggcaagatgattgagcatcctaaatttcatgttttttattgccagacacttgctcatcatcggacttgtaatgccatgtatgtgctagaaaacagcgattagtaacaagatctccatctctgtaacatgtatgtgatgcaaagaaggtttaacttaacataacacaatcacactcctttcgttaaattttttttgaaagaaagagattggaggggattttagccctcaatcccctcccttccaaacaatggctaaataacacaatcacaaaaccacgagagaaggcatgaaggaaaccacaagcgcgccaggcatgaaggaaaccacaagcgcgccaaaaccacccccaggcggcagcgcccgtaggcaccaacccacccacagagaaggcatgaaggaaaccacaagcgcgccagcgcagcagtcggggagaagtggaagtggactcgaggatcactctcgctatcgactacgctatctcaactgccacggacaatcgaaaccaacagtgaatcagccggcgccgcagcatgcctgtacctctcggctctcgctcttatccccacccacctcgctttctcccctctacaagaaagcgaccaccgctgtgaatcagcagagctgcagtgagagcaagtgagaggatcagaggaggcatccgtgaccaaagatcgagtagccaagaagaagagagatgaacgccgacttcggcgcgcccaaggagctcgcgggaggcctgcagcagcggcgggccctgtaccagccccgcctcccgccatgcctccaggtgattcccatttggtcgagcgatcacccgcctttcatctgtgcgattcctgtccgcctgctcatctgacatctctcccccgtctctgctgggcgtgattctgatccctcatgattttttggtggtggtgattgggaggggttattgggggtttacccttcttgattcctctatctatcgacggccaaacaatcggttttgacttttgacccaattccttccttctcctccagggaccgacggtaagggcggagtacggtgacgcgaccacaaccatcgatcccacctgtgcccaagccgtcgcgcaggccttcccgcacacctttggccagccgctcgtcagcttcgtcgcgccggccgccggcgccggcgccgttgaggagcgccacccgatcaggcccgcctcatgacgccctgtctaatcatgtgcgtgcgagatcgcgcgaggcttgcctgaatttgcttccttgcagggtgggcgtggtgttctctgggaggcagtcgccgggagggcacaacgtcgtctggggcctccatgacgcacttaaagcctacaatcctcagagcttgctctacggattcgtcggtaaccaaaatctcgcaaattacctattcggtcacatttttggctatttatacaaagtaccttttcctccagtatcttttttaagatttgtgtgcttcgtgttataggtggcacggagggactgtttgcaaacaagacgttggagatcacagacgatgttcttgcttcctataagaaccaaggttggcttcacttgttctcccctaactaattgtggccaggtttctgttattctcaatactgggatattttgtttgctcttttcaaggtggtttcgatttgctcggtaggagtatcgatcagatccgcactactaagcaagtgaatgctgcaatgacaacatgccacagtctgaacttggatgggttggtcatcattggaggtactaattaaggacacccaatgcccacaaaaggctaccaaaatccgtccaccttttgttttgacataatttgcatggacatgccacaagtcactaccggaatccggctctttgccgagtgccgatgggtttgcggagtgtttttttcgggcactcggcaaagaaatcaataattttcactagtgatgatttttatctcctctgtcctaaatataattctttctagccttttttctgtccacattcgaatgaataataatgaatgcagacatacaaacaacattcatagatcaattaatgaatgtatgtttaatctaaaacaaattatattttgcgacagagagagtattttataaacaaatttaccatgcagttggtgaccatccaaccagtttaaattttgttatgttctaacatgtgaaaactcaatacatgtttatcattagaattacctggatttttctagtggttcaaactagcatttaaaaaaacatcgttctcacttggtctacaggtgtgacctccaattcagatgctgcacagcttgcggagacccttattcagaataactgtaagaccaaggtataaccattattagtctaaactgtttttaaatgctcatattcttggagcacatataagactcctaagaatccaaaaccttcattaaacaggttgttggtgtgccagtttcattgaatggtgacctcaagaaccagtttgttgaaacaacagttggatttgatacagtatgtaaggtaaagcgcagtctagtagaaattttgcataatgtgtagatcctgatggaactgtaatcaaatatgacataccattgccaatctgtcactaatgtcattttgtgtggtaactacttttcaggttaattcacagcttgtaagcaatgtttgtcttgatgcgatctcagctggaaaggtaattatcttgtcacccatttggattagtaactaagcaggctgcaaccattattactactaagaaccatggctgatgtttttttcttcctatcagtactattattttgttcgtctgatgggacgaaaagcatctcatgttgcctttgaatgtgcacttcagtcacacccaaacatggtatgattttatcaaatctgtggttataactctctactatatgaaatgaagaaagagcatcagcatccttttttttcaatttctctttgcagctcatcttaggcgaggaggtagcattgtcaaaactcacactgatggaaattataagcaagatatgtgatggagtacaagcaagggcagaattaggtttgtacagttctttgattgttatgttgcagcagttagtaggaaaaaaagtttgtacctttggttgaggtaaattttctaaaaaaattttctagtcaatcaaggtatcgggatattttataaatcatacactaaaagactggttatccatcttcagggaaatatcatggtgtgcttgttattcccgaaggacttatagaaagcattccagaaatgtatgctcttattcaggtatgtgtgatctatcttcatggaaacaacgggatgataaatagcattatttcagttccatcttcttgttttctgttcaaatattccaggaaatcaatatccttcacaacagtaatgttcctgtggctgagatgtcatcacaactgtctccgtgggcagctgctctgttccagttcttgccacccttcatcaggagagaggtattgcattgctagcaaagttggattttcttaatgtttgtaacattaagataaattctggattaacaatttgtaatatttcactcagctgctgctccaccaagaatcagataactctgcgcagttgtcccaagtttgtgattctgaatgcccaacaacaactcaatcaaaacttaatgtaattattggtgttatagtgtcctattgttttcagattgacacggagcaactgctggcccatctagtagaaacagaaatgataaagagaacggtaatttccattcttttgctatttcttgttttttttttccttctctgaacctctgtccatagtgattggggatgtttgatatttcagaaagaaggaaggtacaagggaaggaagttcagttcagtatgtcatttctttggatatcaggctcgaggatctacaccatcaaatttcgactgtgactatgcttatgtgagtactatttcactgagattttggaaaactgaatgttctgatgatccgatccttatgttattcatgctaacactgaacattttaggctcttggacgtatctccctgcatatgattgcagttggattgactggctacatggcaactgtggctaatctgaaagaccctgttgacaaatggagatgtgctgctgctcctttaactgtaataagatgtcactgaccatgccttcaagatcagatgctgaaaggttacttatctatttatgttgacctagttgcacaatctgttgtctctaccaggcgatgatgagtgtgaagaggcatttacgtggccctggagcaatccctatagggaggccttccattcacccttctccaattgacctgaaagggaaggcttatgagtaagtccacattgttcagggctttgatacctggtcctgcttttttttcccccgataagtagaggaaaggatgcgacctggaaggaaggtgaacgggattgactttgttcctgcatcattcaggttgctgcgagagaaggcttcaagcttcctccttgacgacttctacaggactccaggaggcattcagttcgaagggcctggttcagatgcaaagcccatcacgctgaccattgagaaccaggactacatgggtgacattgagatactgaaagagtaccttggcaaggttgtgatcgggaatcctttcatctgcttccgagtagtttcagattaaaaagaaaagaaaaaaagcttttcatttaagaagcaggtcccttcctaacattggcatgcccaacgatgatgtggtcccaggttaggaccatggtgaagccagggtgctcccgggagatcctgaaggcggcgatcagttccatggtgtcggtgacggatgtgctgactgtgatgtcccaccccctcaacgccgagctgcccctctaccatttcaagtgagcgagggcatcagtctggttgttattcctagagtgtttttgaaacagcagaagattctgcttcatggctgccggtcttctttttttttaatttgggtgagaattaagcaatgggttgtactaataaacactgaaacagtacttgatactgaactgagtcgcgtgctagttgtattattggtggcagtattccagttttcaagaggtctctagaatatccaagattgataacactcatctttcagcctagcaatatagtagtagttctttctttacttactattaatgcactttctctcctcgcaaagttaagaattgcccaaccacctcttcttcctcgctgccctccaaggtggccaagagccaacagatcgatgacagaaactacaaattaaaaacaaacaaataaaaaggacatgcatgacctgatcaccacccatctcatagagagttttttttatcaccacctgaccaccaaccatctcctagagaaggatggatcgacaaacctttttttaaagtaatcgttgcaggaggttgcaatctagcacagggcagtctggtccgactccgctgcttgccgcgcctcgccgaggtgccggctccacgctgctagagagatgaggcacatgtgaaggggcctgccgctccgctcggcctccatatgtcgggcgtttttcagcacaaaagaaggatgcggatgcggaaatcttctggtttcggtagcgtggcctaaagtcgcgtcatgataggaggaggctgtttccagcagacttgaatacgatgcggagaggaatctggcagttgagactcaacgcatatgcagaaggagagccaaacatgcatacactcgatgcatctcgtacggccccacacgagagccacgggcgtatttggtttgtgcctaattatgtcacactttgtctaaggttagtcgttcgaattgaataactaacattagacaaagtgtgataaattagacatcgaaccaaacaacccttgattttgcctaatgcatgaccatgtgaatctctcggttgaatgtgtgtttccattttgcattgccacacaacactgtgccaaaacacatttggactatttgcctcttaatttcgtctgtccactaatttcgtctgtccacgttgggtttagtctaagagagaaactacatatatgtggatctcgttgttttatctg

SEQ ID NO: 752 - protein, 618 aa, Zea mays
MNADFGAPKELAGGLQQRRALYQPRLPPCLQGPTVRAEYGDATTTIDPTCAQAVAQPFPHTFGQPLVSFVAPAAGAGAVEERHPIRVGVVFSGRQSPGGHNVVWGLHDALKAYNPQSLLYGFVGGTEGLFANKTLEITDDVLASYKNQGGFDLLGRSIDQIRTTKQVNAAMTTCHSLNLDGLVIIGGVTSNSDAAQLAETLIQNNCKTKVVGVPVSLNGDLKNQFVETTVGFDTVCKVNSQLVSNVCLDAISAGKYYYFVRLMGRKASHVAFECALQSHPNMLILGEEVALSKLTLMEIISKICDGVQARAELGKYHGVLVIPEGLIESIPEMYALIQEINILHNSNVPVAEMSSQLSPWAAALFQFLPPFIRRELLLHQESDNSAQLSQIDTEQLLAHLVETEMIKRTKEGRYKGRKFSSVCHFFGYQARGSTPSNFDCDYAYALGRISLHMIAVGLTGYMATVANLKDPVDKWRCAAAPLTAMMSVKRHLRGPGAIPIGRPSIHPSPIDLKGKAYELLREKASSFLLDDFYRTPGGIQFEGPGSDAKPITLTIENQDYMGDIEILKEYLGKVRTMVKPGCSREILKAAISSMVSVTDVLTVMSHPLNAELPLYHFK

SEQ ID NO: 753 - DNA, 6581 bp, Zea mays
aagtcccttattattatttatgttaggcctgccagcagtcctatgcgaggtcagcaactaaacaagcccctaaagccttccctccatcgaatgctaccaccgagtgaccaatttgaaagcatgacaaactgttgcaaatgatttctaaggccaaggatacataccgcgatcctcataataacagtagtaatagtaataccagtaatagcagcagcagtaaataataataataataataataataataataataataataataataataataataataatggtggtggtggtagtgctagtgacgacatcaactaggaaaacaaacaaacttaggactgtttggatctctggactcatatcaaatgtttgaacactagttaaaaatattaaatatagtctaattataaaactaattgtatagatgaagactaaacgttaagacgaatctagtaagtctgataagtctatgattcatttatatgatgctacaataaatattggtaaacattgactaataggtttaataaatttgactttcagtttagtcttcttctatgtaattatttttgtaattagactatatttaatgcttataattaacatttaaatattaggtgtgatacatattaaactttagtcatgaaccaggctgcttaaattagccgatgttgtagacgcgagatcatttaagacgtgtttcgttccatccaattaaactttaatttctatcacattgaatgtttaaatgatgattatagatactattaaatataatttaattataaaattaattacacagataaagactaaaagaaaaaaattattatacctaattaaggctatatttaataattataatgatatttaaatatttgatatgatataaactaaactttatctttattctaagtcttgtactcactgtcacgagaaaaagaaaagaaaacaaaattaagatcccgtactacaaagagatgagttaaaatcgcacagccacacgagcagtctgaccaccactaccttccctatcagaccgacagaccgtgtgtcagtgtgtggcctcactcactcaccgatccctcgccaagccacaggctccccgtgagctccgccacgcgggcgcctcgcctccttcgtccttcctcaccgcagtcagcaggagcaatggcgatggcagccatagcctccccgtcgtcgaggaccctgatccctccgcgacaccacggcgccgcgccctccccgtccacctccggcgactcctcgctccgcctcctctgcgcacacccgcgccacggacggcgcggccgggcgatgtccgtctcgacgcccgcggcgcggagccggccgttcgtcttctccccgcgcgcggtgtccgactctaagagctcccagacctgcctcgaccccgacgccagcacggtatgccccgctgcccacctcactgcacgggaacgcggaggtttctcttggcgcgcctggacttctctcgcttgcggcttgcctctgatccgtcgggttgcgccttcgaggcgcatttgccgttcctgatgggagattgggacgcgcgcgcaaaagattgttttttaatctttatgaataacgcgttgctcatctagatgcgcagatcggcggctgggattgtcgccttctcatgtgcacgtgtctgctgcttagtgcagtattttctatttgtatgtattaggtaccgaaagaatgaagcaaagcaactttatgatgccagtagttgcgaggctcgtgtcgttaaataggagtacttgtaggagccactatccagtaataaattgatcaagatgttgtgagggctgtagttgttggtatttttggatcatgacttatttatttaatcgtttcttcttcccatataggatattagtttttgggtctgatgcagaaattatattgttgcatttatcctcgagtggcctctgttgtttgaacttgtctgtgtcccgtcttttaaatttgtcgtgatgcagaaattatgtttttagtttccaaggagtgctaatagattttgaatttcagagctgtcagtgtccatttctgatgttcactcttggctgtataccataataacacacatttgttggttggttcagagtgttcttggaatcattctcggaggtggtgctgggactagattgtaccccttgacaaagaagcgtgccaagcctgcagtgccattgggtgccaactatagactgattgatatccccgtcagcaattgtctcaacagcaacatatccaagatctatgtgctaacacaattcaactctgcttccctcaaccgtcacctctcaagagcctacgggaacaacattggagggtacaagaatgacgggttcgttgaagtcttagctgcacagcagagcccagataatccaaactggtttcaggtatccctactaatgctgtgtcttttctgattttctcaaatgtgaaatctgccatttcgttaacatgcacatctgacaccatatttacattttctccattgcatattctcacttcgcactaccatcaaatttgtaaccaacagagtacagacaacaaaggtcattccagttggttattgaacatgagtttgaagtgtaccatcatgccttaagcaaatgcatgctaatctacaggaaattttgttagcgcacttcactagcttactccaagtactgattttcttttatattttttctcagggtactgcagatgctgtaaggcaatacttgtggttatttgaggaacataatgtgatggagtttctaattcttgctggcgatcacctgtaccggatggattatgaaaagttcattcaggcacacagagaaacggatgctgatattactgttgctgccctaccaatggatgagaaacgtgcaaccgcatttggcctcatgaaaattgacgaagaagggaggattattgagtttgctgagaaaccgaaaggagatcagttgaaagcaatgatggtacacataatttgccttttctttcaagctaacttgacatacatttgttgacaatcatttagtgaacctaaaatattcccctttaaaatgccttcatctcatatttctgtctgattgatgtaggttgacaccaccatacttggccttgatgacgagagggcaaaggaaatgccttatattgctagcatgggtatatatgtttttagcaaggatgtaatgcttcagctcctccgtgaacaatttcctggagccaatgattttggaagtgaggttattccaggtgcaacaagcattggaaagagggtatgcagagattatataaccttttagctctttgttttcttcggtttactgatgtttcctttttgtaataaaaagtatatagccctttcacacaaatgtcagactccataagttggtaacctagcatttcatttctgaataaatttactattatctaaacacttacattggagtgcatatctgtagtttatgtgcatcaagtgtttcctaagaacagcatgctagaaagcctaggcaggttgggttggctcaaggccggagggagggaagggttacaccttttaaaatggtatttaagaccttatttttgtctgcaggttcaggcttatctatatgatggttattgggaagatattggtacaattgaggcattttataatgcaaacttgggaataaccaagaagccaataccagatttcaggtatgcacattttcacttctcactgtgctgcagtagaaagttacaacgccgcatgcgtgtcaaatcttataatttcaattagtccctgctgatttagcgtttcccttcaatctgaatacagcttctatgaccgttctgctccaatctatacacaacctcgacatctgccaccttcaaaggttcttgatgctgatgtgacagacagtgttattggtgagggatgtgttattaaagtaagtagtgttttgttttactatagcatatttgaaaacctatatatagactttatatcctccaaagtatttttcccgtaattcatttactaaaacatttatgccttgatcttgtgcacacagaactgcaagatacaccattctgtagttggactccgttcttgcatatctgaaggtgctatcatagaggacactttactaatgggtgcggactactatgaggtaaatatatacaagtgtacactgctgccaatgcaacaagagagctcacaccttggcgttcttcttttccagactgaagctgacaagaaactccttgccgaaaatggtggcattcccattggtattgggaagaattcacacatcagaaaagcaatcattgacaagaatgctcgaattggagataatgtgaaggtatttcaaactgatgttctaacggtcaagaatatattggtctatttttttaccttaagataccacataatacttgatatgttattttctcctcttaatttctgcatttatttcgaaaatatgaataattttgcatgctctcgttttttacatggaagatgcctatataatatggctgtccatacttatctttccccaattgcctgcataaatcttcatcctgcacatttgcatgtatttaactgagctaatcaagctgaggtcccgttttccacgagataaaaactgtgaacaagtcatatcagttttttgttataaaaatacacaataaaacctgaaatgcagagcttcatatcagtttgtgctttggctttgcaatactgcccatgcatatgccattcaagttccacccagaaacagctgccattatcctgtaatcttgatcctattccctttctctgttattgtcattgtttgatagacctgttgcacttgattattcataaatttaagttgtcatgagtcatgaccagatgagtcagatcatctgatgagtcagataagtcttagcttgtaatatgattaaacacgaacagttcattattagacttgccacacattttatatggccgtgatatttctcacgagactcgtcgatcttgcagatactcaacgctgacaatgttcaagaagctgcaagggagacagacgggtacttcatcaaaggtggaattgtcacagtgatcaaggatgctttactccctagtgggacagttatatgaagtaagctctctccccctgttcctacacaaactgctgtcagtaaagcttcacatgcaaagacttcgaaacacatctcactcaaaatattgaatcaactaggttgcaaatgttacatctttgctcgaatttgcaagcctgcctgttcacaagatcactgttctgtactgtgctgcaggcggatgtgcgacatgcaagccagagtgtcatcgacaatgatcagcatctggttacatgcctgatctgcagttcagtgtgctggagatcatggaaacaataaaatgtgtcattcaaggcactttttctctctctctgatcttttgtccttaaatgttgtgggttatatataatgttgtagcagaaacagttagtacaatgctgaatcaaaactggatggctggatttgggatacatcttcgatgctgtgtcattgatcagtttaattaccataccgtgctgctttgagcgaagccataaaggccatgctctgcttattgtgcgtacgaacagaagcgtcgctggtttgcagatttggatctactcgccctaatagttagtagccaatagtccctccgtttcgtttgacaatattaccctaagtttaaccggtttgtcttattaaaaaaattcataataattattataaaatttttcataataattattattaatttttacagtgatattgtttagtatataagtatggctttgaatttttctttttttcgcgattgcgatggagtagctaccaactattagctagctagttattactttgatccacctacttataagatacttaatactcctcatctcaaattaaagttcgttttagttaattaatgttttagttaattaatggattcatacaatatttgatgtaagtgtctagatttatttttattcaatcaaatatagacataaaattaagaactaaaatgattactattttgaaacggagagaacagagggagtagttggtatctgttaattcctattagcagctgtaaacctgctaatgaaatttcgctagaaacagtttaattttcataagaaaaatggaaacattgagttcaaagaggtcgatgctccagaagcatctgcgtcaaattgatctttagacaatgtttctttccctaggagattaaacatgaagcttataatcaaagctgtatgcgagggagatcaacaattcttttaccagcgctaaatgacttttgagctccagcacaagctcaaggtatgtttcttttaaaaaaatacaatggtcttacagaatacctaaacattgacatacaaggtgtttgcatgtcaaattgtacttttgaaccctacatgctaaaaccatttttaatacagtttaggaaacttcaaccagaccttttttatttacataccaaatccatttttaatacagtttcagaaacttcaaccagaccttta

SEQ ID NO: 754 - protein, 517 aa, Zea mays
MAMAAIASPSSRTLIPPRHHGAAPSPSTSGDSSLRLLCAHPRHGRRGRAMSVSTPAARSRPFVFSPRAVSDSKSSQTCLDPDASTSVLGIILGGGAGTRLYPLTKKRAKPAVPLGANYRLIDIPVSNCLNSNISKIYVLTQFNSASLNRHLSRAYGNNIGGYKNDGFVEVLAAQQSPDNPNWFQGTADAVRQYLWLFEEHNVMEFLILAGDHLYRMDYEKFIQAHRETDADITVAALPMDEKRATAFGLMKIDEEGRIIEFAEKPKGDQLKAMMVDTTILGLDDERAKEMPYIASMGIYVFSKDVMLQLLREQFPGANDFGSEVIPGATSIGKRVQAYLYDGYWEDIGTIEAFYNANLGITKKPIPDFSFYDRSAPIYTQPRHLPPSKVLDADVTDSVIGEGCVIKNCKIHHSVVGLRSCISEGAIIEDTLLMGADYYETEADKKLLAENGGIPIGIGKNSHIRKAIIDKNARIGDNVKILNADNVQEAARETDGYFIKGGIVTVIKDALLPSGTVI

SEQ ID NO: 755 - DNA, 9529 bp, Zea mays
tcagaagacatccagccctaggctaggcgcacggcggcacgggaggcagacgaggcgagaagtggcaactggcaactggtacctttggggaggcgaggaaggacacgaggtcggtgcgttcgtgcgtgcccttctcactgcacgccagtgagaattgagatcccagcaccgagacgacgacacaagtctcacctccatcctcctttactcctcatcctagatccctctctccgaaccccgccgcccgccgcagatccgaaggtcattggcagccatgatctcgtccagcaagctcaagtccgtcgacttctacaggtgcgttcccgatccgttctccctagatctcaagagcacctccactcctcgcccctttccgggatagactgggatggtgcgattccctggggttggattgaatatatattgctagtctagaacggagagtggtttcgtcaggttgggcttggcggatttcgtttgggtgagtcctggatggcagcggtgtgtgcctcgcggcgaatgcgcattttggcggggtactctgcgtcagcgagagggtatcctttgtctgtttctagctgggtagagacgagagacccgcacgatgaatcggtagctgctgtgttcaaaatgttggtgtgtgagtctgacatctgtaattgcatcttgactgttactgtatatttcgtttttgtgagaaatttgctattttgccactcattttggcttttgtagtggtgcttcggtttgtagtacgtgttacactctggtgggatatgccattctaataaattctacaccctcattgcaaattataagacgttctgtcttttttttagatacattacttttattatatatgtagacatgatgtagatctaagtgcatatcaaaacctatgtatctaaaaagagccacaacatcttataatttgaaatggaggaagtaaaatagaagctaattggacagttttggattggatggcattgctttgtctgcttgcagaagctcgtccttagtaagggtccgtttggatcccaagagctaaagcaaaagtgactatagtttagtcatttagtggctaaagatccaaacacgaagagctaaaagtgactaaaatggtcctaagcatacttagccagtcatgccaaagttcttttcataccattctgtttctgttaaaacaaataactgcttattattcagacgttatacattcatgctatgttgaactattgtgcaagggtctgaaccattattgttatgatttgaaagttgagtagcttacactatttagtttttcgatgtatcaatcacgttcgatcagaaacttattgttatcaatagtcaacctttgtttgagcaagctgttagtccttgatttgcaagtccccagaataataaactggagattaatttgattcagaatggctgactttttctgttctctcctcagttacatttacgtgtggtgaaattctatgatttctttgtatctactatctagtaataatttgtagactatttggattcagaatgactaactttctggttactgttttctgagtttcatttataactgatgggtttagtttctctttctctttctagtagtgaatgtttggatattttttcatcttgcaggaaaatacctagggatttgaccgaggcatcactatctggcgctggattatccattgtagcagcattagcaatggtttttttgtttggaatggtctgtttttttgttcccccctcagtttcgtctgtaatcagttgcagtagttgctggcacttctttttctgtcaaagacttttagcaccaaaaaattaaaagccagcatgataggtcttctttcatgctccaattggtggttttaaacaagtgtatggaaatgaattgggaaaatgattgaacttcactccttttgtttatgtagaattgcagatataagtgcattatcatttggttttctgtagcatagttgacttaagtaacaatgtttcattcctcactcctattgtttctgtagcatcaatgttttaattgattcaatcttgttatctgtttcacgttcaattgactattgagattagaacatcgacaagatgtgctagattctaaagataattatgactgggtgagcttcaagctaatatggtcaaattttgatttagatttgtcaattgtgctgtactaaacattgaaagtgatggtttaggggggtgtttgggactgctccagggtccaactccagcatggggctgtagtttataatataaatttaaatagttttaaaatcatttttaatttgaataataagtaaaatgacttatttaaatgtcttcttctaaaggttcacaactccagctccacgattttctggagcacctaataacctactctgctccgccaccttcaccaatttttctaaagttggagtagtcccaaatatggccttagttacattctaacattctgtatccaaaatattccacttagacacactaaacatttcagttacattttgtatcctaaatatttgttgctctgaatccaatacatcgtgggttgacattttttaaatattgcaatgtgctttacatgctagcagtttgaagttgacttgatttctcattcaagatctgcgggctttatctttttcaatggtggactttgagttttgaactaacacaatgatgatttgatattgcaggagttgagcagttacttagcagtcaatactaccacatctgtgatcgttgataggagttcagatggggagtttttacggatagatttcaatatgaggtaagccctatggcatccctcaagtgttgttcagtttggtgttaaatatagcaatatgttatctacttatgtgcccgtatggccgtatggttggatgtattacattgctacctgttaaactttccacatgggtttgcaatttatggaaattggtggtttcctgacttatgtctgctctgctgatactaattatttgatgtcataattataataagctaatgcaaatgcctgcttaagacaaatgagttcatgattctgagtagcatacaacactctaaagaaaatcatgtaaccttagacttagagaataacttctagtttttagtggctagtctaatatctaccttccccccctctaacgtgtttacagaatgaccttaccttcttctgttatctattatcccgtacccctctttttcttggataccatattgcctgagataacatgatctatcagagaatctaaattctaatgcccagggaaagtgtgaatagtaggggggacacttctttttcgtttgtactttatatcattatattgttaaattagttcttgctggtcatttgtgctcttttctttgaaacgaaccagacagaagagctgccgattatattaataaaggagaagggttcggattggacaaaataacaaaacaacaaacaataggcagttggattgggacatcaacacgccgacaccatacaaactcaacccgccggttcgattgggacatcaacacgacacaacactcaccgcctacacaatgcacaaaacagcccagacaacggaagcccccccccacacacacaacccatccagacttgacttatcgttgccgagctcgacctaagggacaagcagctccgactccgcaagacgggccacacatggccaaagaaaacacgacaacacctataaccaaacaccggcacagaaggaggaagatcgcggtgcgccgtcgttgcaagcctcaacacaccccacgcgaggcagctccgattcttcaccaacgagcttgaacctccgtcgtgcccccggcagatgcccgaacctacgaaccaattcagtccacgaagaaggggtctcgacaggtgtcatcgttgtcgagccacaacctctgatgcagcattttcgagttcacgctgcaaaggcccaccttcacctgcatgccagacgccgagaagcgaaagcaactaccgaaggcgaatccgaggccgagacaaacttcaggaagggagtgacgttggggacgacaccgtcgcgagtccgagatggatcgggctttctcccaaggaagacaatgctggggaatgtgacgcccccaacaggggaagcggcgcccacgggtgtcgccgttgccgaggcttttgcccaagaagcccccccagcaccaacgtccggccaagaaccactgtcgccgccgtccatacatcccgcaagaaaccctccagaggggcgtcgacgcgatggatgccgcaccagccgcaaagccgtgtcggccgccacccccactggcctggcacacagaaccggacaactccttgccacgtgtgtcacactggcgcgtgcaggagctgaagccggtagccgctgatggccctggcacacgccgccaccgaagccagttgccgccggacgaccatgcttccacactgcaccacaagctccgcggcagcaccacgccgccacagcaccaccggccgccgccgcagcctcccactagaaagacatggatctgcgtgccgggagacaacatctgcctaggggcagacggatctgggcgcagcgggccacgccgccggacgtcgcccccatgcagtcccatgcttccacactgcaccacaagctccgcggccgcacaaccacaccaccacgccgccacagcaccacaacctcccctactattcacagtcatttgtgctctggaatgtttttagggaatcaagatctactactactactaccttttttttattcaattgttaccattttgtttatttgttcctttctccttggttcatgtggctctttgttggtttcatctctggcatacaccaaattacttgggatgaaaggatttggtgttggttaggaatttggattgatttcatcaactctggactgcaaaacttaactattgttctctcaaatatttactgaccacctttgtgttttgcagctttcctgcgctttcatgtgaatttgcatcagttgatgttagtgacgtgctgggaacagtaagatatatctttgctcatatgttgtgttttggttatagcctctagaatatggcaaaactcttagttgatatccttgaagataatgaataaagtaaaacatcagagacatcttatgatttgtggaaaaataaagaaatgttgaagtcttcatgtacattagcatgcacattaaaaatcatttgcactaccttttgtaaactatgtatatatctgcacatcacatcatctttttttgtttaacttaagttatctgttaattccatatgcagaacagattgaacataacgaaaactgttcgaaagtattcaattgatcggaatttagtaccaactggatcagaattccaccctggccctatccccattctcaataagcatggagatgatgttgaagaggatcacgtggatggtgcattttcattgtcatctcgcaattttgatagcttttcacaccagtaagcattcagttatctaccaacctacagtcctgcttgatcaagcattagtcattttgtattttaaaatcggcagtgaccattatttgtattattctagtcataaccacctttttggtcaacatttatgtctcactttacatccattgtatctcaatagctccaattcttttggctagattttttatgacaaagcatctctgtttttgtgttaagattttttggatcgaatgtttacgcagtatttgacctgtcttgtattttttgtggaaattatagcactacattgcaacatgaatgccaaaatagcattggctttgtctgacatgtgggaccaggtcctacatgtcacacatttcgatggtgttttaacaatcaagttagtaacttactaacttgtggtacagaggcgacatttccatctcttaatattgcttgtagtgttcagaaggcgtcacctagctttgcctagatgtaggtagagcagcactacctcacctaggacctaggcatttttaccgccaaaaataaaaaataaatagaattgtctacttgtctaggcacatgtaggtgcttgggtgcctgaccgcctgcctagcacctagcacattttgaatctttggctttgttgatagttatcctttttcttgaacattttttgtacttacttatccttattttgttcctttgcagatatcctgttttggttgtcaacttctatgctccctggtgttactggagcaatcgactggtcagtatttatttccttgtgttctttttcatttctttatgttcacaaatcacaactttctgtggcaacaagccaacaattattgacttcctgtatggtttactgtgcaagtcatctggacataatgtacaggatgcttagccttttatgtttttattccagctgaaatatatctgtggttttgcgttctgttgatttcaaatatttcttagcacttgtttttttccccagaaaccttcatgggagaagacagcaaaaataatgagggagaggtaaatgctgttattctgtatatgcccctaataaggtttcacgatgaatatcttgcataatcaattactttctttctgatcatgtgcagatatgaccctgaaatggatggtagaatccttctaggcaaggttgactgcactgaggaagttgaattgtgtaggaggtctgtacctaattatacttattacattcaggaccaacacgatttttaaatgtatatgatgtggtctgcaatcaaatcattgttagttactataattttgtcaactagttacaaagtctctgaataagagggtattatagtgtcaatctaaattctaaaaaatggtaatcatgatgctattgtgtttcataaattacagtgttatatgcactccatcttggttctgtagtagctattctttctggaattagttcattgagatctagttcttctggtaccaagtttcaatcaaagatctgttaagattaatatggaattgcttaaggaaaggttccatgtaaagctcatgccttatcggtacaatttattcagaccacatttatttgatattttttgactatccgttttgttgatctctggccttgttgttggccattatggcttcaactttggaccttgttggtccatacagttcctgtaaactatctgtcatttgtaaataaatgcagtttttatgtgttccaatatattgttggataaaaagtgggaaggggcctggtgctggggatgctgtttaaccttgccctgaaacggtttgcacctaggggtgttgttgcccattttcattagtgattgtctgtcttcataaacagacagaaggggtgccaggctgcctttatatatatatatatatatatatatatatatatatatatatatatatatatatatatatatatatatatatatatatatatatatatatatatatatatatatacatatatatattgctggtgttataatacgcacatttcaaactgcacatattgataacttattgttgaccacaagagaaatctagagaatgtttcttttcttttcattcacatcatgacacttgtatgtacctttataacatttttgtttgtgattttactgatatatctgaataagtaaatagctggaacatacttttcattactttaattcatcaaatgcagaaaccacatacaaggatacccatccattcgtgttttccgtaaagggtctgatataaagtaagcacaagccttcttacattctatttcgatacttccagttttatttgtagcatctgggttttgtttaggtagcttccaagtatatgctaattaggctgcaaacatttgtttgttctatatttgtgatatttgcactagttttatagaaggaactccctgttttctctttgcgcagggagaatcagggtcaccatgatcatgaatcatactatggtgaacgtgatactgagagtttagtcgcggtatgttatgcatcatctggtttcagattaattgcggttggactgacttaacattttatatgatactatatcctaagcatcatgcatggggaaataaaatagcctttaagaggctactacattatctattgttggttgtgagcaaattcctgatgtaatgttttgaacctcaggcaatggaaacatatgttgcaaacatcccaaaagaggctcatgctttggaagacaaatccaataagactgttgatcctgcaaagcgccctgctccaatggccagtgggtgcagaatagaaggctttgtgcgtgtcaaaagggtaaacgagctacacttcaaaatcacatagataattttgtgctaatggttggtaattcgaagatgggtgttttgctgaccttaataataacttgtcatgtttaccaggttccagggagtgttgttatctcagctcgatctggatctcactcgtttgatccatcccagataaatgtttcgcactatgtgacacagttctcatttggcaaaagactttccccaaggatgctgcatgaattcataagacttactccctatcttcgtggataccatgatagactagctggccagtcttatactgttaagcatggtgaggttaacgccaatgttactgtaagtccctaactttttcttatttttttactaagattgtatggtcagcttcagtttcttttgagcgggtgatacttcttgtttcttatggataacatagattttgtttcttctgtgctaatagattgagcactacctacaagttgtaaagactgagcttgtaacacagaggtcctcaaaggaactgaaagtgcttgaggaatacgaatacacagcacacagcagcttggtgcacagcttctatgttcctgttgtgaaattccattttgagccttctcccatgcaggttcgcatgcccatatctttttagtttctcatacgttttgttttcattaacaagtgaatgatttatctaaaaaggttcacatttaaaggtcttggtaactgaagtcccgaaatccttctcccatttcatcacaaatgtctgcgctatcatcggtggggtcttcacggtgcgaacacatccttgcttttcacatatgatctttatagtcaatcaaaaaaaaaaagtctactgaaaactgacatgcaaattctaggttgctggaatactggattccatctttcacaacacactcaggatggtgaagaagattgagctaggaaagaacatttaaatttcgacgccgctgcaagtttaggcggatgcactaggtagccattgttttgttataactaggtaatgactcatgaaaatcggtatatgaaagatggcgtgctgaattgacggttgaaattcggggggtcatgaaatcatcatataataactagggatctcactgtttcgctaaaccactcacaataagacagtggattgctgctagtgtgccactgtgataagtaaccgagttggataatatattcagtatattatcttgccgtg

SEQ ID NO: 756 - protein, 173 aa, Zea mays
MIRPAPWVGAGHRGRGGEAGACTESLGSESGDVGCDAAEIDQFFPPAPAAGGPDDAGAEPCIPDLAAAAAAGKRRRGGFPPPMPRASGPLFLRAERRGGRLILTEVRADERERRVVFRAERDGGRLRLRFANDGDGPEAAGGGGGAGGGGGELCQVAAGRRGVQVGAVMMGAI

SEQ ID NO: 757 - DNA, 5866 bp, Zea mays
gttcgtgtggcagattcatctgttgtctcgtctcctgtgcttcctgggtagcttgtgtagtggagctgacatggtctgagcaggcttaaaggttctgtttggttcagcttttttctgaccagcttttctgaaaatccggctgtggggagaatctggctgtggggagaatctgagtattattacgattacgtgtggaggaagataaagtatttcatagggctcaggatttagaaagtgacagattcctactattacaacgactcaaccgattatatgtttatgttgattttggatggtttttgcccccaacgaattttatagaagctggctgaaaagtgagtgtttggcagtctgcagcagcttttggtggccagaagctgctagaagccgaaacaaacagggccaaaatttgctcgtagacgaggagtaccagcacagcacgttgcggatttctctgcctgtgaagtgcaacgtctaggattgtcacacgccttggtcgcgtcgcgtcgatgcggtggtgagcagagcagcaacagctgggcggcccaacgttggcttccgtgtcttcgtcgtacgtacgcgcgcgccggggacacgcagcagagagcggagagcgagccgtgcacggggaggtggtgtggaagtggagccgcgcgcccggccgcccgcgcccggtgggcaacccaaaagtacccacgacaagcgaaggcgccaaagcgatccaagctccggaacgcaacagcatgcgtcgcgtcggagagccagccacaagcagccgagaaccgaaccggtgggcgacgcgtcatgggacggacgcgggcgacgcttccaaacgggccacgtacgccggcgtgtgcgtgcgtgcagacgacaagccaaggcgaggcagcccccgatcgggaaagcgttttgggcgcgagcgctggcgtgcgggtcagtcgctggtgcgcagtgccggggggaacgggtatcgtggggggcgcgggcggaggagagcgtggcgagggccgagagcagcgcgcggccgggtcacgcaacgcgccccacgtactgccctccccctccgcgcgcgctagaaataccgaggcctggaccggggggggccccgtcacatccatccatcgaccgatcgatcgccacagccaacaccacccgccgaggcgacgcgacagccgccaggaggaaggaataaactcactgccagccagtgaagggggagaagtgtactgctccgtccaccagtgcgcgcaccgcccggcagggctgctcatctcgtcgacgaccaggttccgttccgatcctgtccttgagtttcgtccagatcctggcgtgtatctacgtgtttgatgatccaggttcatcgaatctaaatctgtccgtgcacatgtcttctctctctctgtctgtctgctatgcagtggattaatcggcatggcggctctagccacgtcgcagctcgtcgcaacgcgcgccggcctgggcgtcccggacgcgtccacgttccgccgcggcgccgcgcagggcctgagggggggccggacggcgtcggcggcggacacgctcagcatgcggaccagcgcgcgcgcggcgcccaggctccagcaccagcagcagcagcaggcgcgccgcggggccaggttcccgtcgctcgtcgtgtgcgccagcgccggcatgaacgtcgtcttcgtcggcgccgagatggcgccgtggagcaagaccggcggcctcggcgacgtcctcggcggcctgccgccggccatggccgtaagcgcgcgcaccgagacatgcatccgttggatcgcgtcttcttcgtgctcttgccgcgtgcatgatgcatgtgtttcctcctggctcgtgtatgtgactgacgtgtgtgttcgggcatgcaatgcatgcaggcgaatgggcaccgtgtcatggtcgtctctccccgctacgaccagtacaaggacgcctgggacaccagcgtcgtgtccgaggtacggccaccgagatcagattcagatcacacatcacagtcacacacaccgtcatatgaacctttctctgctctgatgcctgcagatcaagatgggagacaggtacgagacggtcaggttcttccactgctacaagcgcggagtggaccgcgtgttcgttgaccacccactgttcctggagagggtgagatgagatctgatcactcgatacgcaattaccaccccattgtaagcagttacagtgagcctttttttttgcccccgcctggtcgctggtttcaggtttggggaaagaccgaggagaagatctacgggcctgacgctggaacggactacagggacaaccagctgcggttcagcctgctatgccaggtcaggatggcttggtactacaacttcatatcatctgtatgcagcagtatacactgatgagaaatgcatgctgttctgcaggcagcacttgaagctccaaggatcctgagcctcaacaacaacccatacttctccggaccatacggtaagagttgcagtcttcgtatatatatctgttgagctcgagaatcttcacaggaaacggcccatcagacggactgtcattttatactgactactgctgctgctcttcgtccatccatccatacaaggggaggacgtcgtgttcgtctgcaacgactggcacaccggccctctctcgtgctacctcaagagcaactaccagtcccacggcatctacagggacgcaaaggttgccttctctgaactgaacaacgccgtcttcgttctccatgctcgtatacctcgtctggtggtggtgcttctctgagaaactgaaactgactgcatgtctgtctgaccatcttcacgtactacctaccagaccgctttctgcatccacaacatctcctaccagggccggttcgccttctccgactacccggagctgaacctcccggagagattcaagtcgtccttcgatttcatcgacgggtctgttttcctgcgtgcatgtgaacattcatgaacggtaacccacaactgttcgcgtcctgctggttcattatctgacctggattgcattgcagctacgagaagcccgtggaaggccggaagatcaactggatgaaggccgggatcctcgaggccgacagggtcctcaccgtcagcccctactacgccgaggagctcatctccggcatcgccaggggctgcgagctcgacaacatcatgcgcctcaccggcatcaccggcatcgtcaacggcatggacgtcagcgagtgggaccccagcagggacaagtacatcgccgtgaagtacgacgtgtcgacggtgagctggctagctagctgattctgctgcctggtcctcctgctcatgctggttcggttctgacgcggcaagtgtacgtacgtgcgtgcgacggtggtgtggtgtccggttcaggccgtggaggccaaggcgctgaacaaggaggcgctgcaggcggaggtcgggctcccggtggaccggaacatcccgctggtggcgttcatcggcaggctggaagagcagaagggacccgacgtcatggcggccgccatcccgcagctcatggagatggtggaggacgtgcagatcgttctgctggtacgtgtgcgccgcccgccacccggctactacatgcgtgtatcgttctactggaacatacgtgtgagcaacgcgatggataatgctgcagggcacgggcaagaagaagttcgagcgcatgctcatgagcgccgaggagaagttcccaggcaaggtgcgcgccgtggtcaagttcaacgcggcgctggcgcaccacatcatggccggcgccgacgtgctcgccgtcaccagccgcttcgagccctgcggcctcatccagctgcaggggatgcgatacggaacggtacgagagagaaaaaaaaacatcctgaatcctgacgagagggacagagacagattgattatgaatgcttcatcgatttgaattgattgatcgatgtctcccgctgcgactcttgcagccctgcgcctgcgcgtccaccggtggactcgtcgacaccatcatcgaaggcaagaccgggttccacatgggccgcctcagcgtcgacgtaagcctagctctgccatgatctttcttctttctgtatgtatgtatgtatgaatcagcaccgccgttcttgtttcgtcgtcctctcttcccagtgcaacgtcgtggagccggcggacgtcaagaaggtggccaccaccttgcagcgcgccatcaaggtggtcggcacgccggcgtacgaggagatggtgaggaactgcatgatccaggatctctcctggaaggtacgtacgcccgccccgccagagcagagcgccaagatcgatcgaccgaccgaccacacgtacgcgcctcgctcctgtcgctgaccgtggtttaatttgcgaaatgcgcagggccctgccaagaactgggagaacgtgctgctcagcctcggggtcgccggcggcgagccaggggtcgaaggcgaggagatcgcgccgctcgccaaggagaacgtggccgcgccctgaagagttcggcctgcaggccccctgatctcgcgcgtggtgcaaacatgttgggacatcttcttatatatgctgtttcgtttatgtgatatggacaagtatgtgtagctgcttgcttgtgctagtgtaatatagtgtagtggtggccagtggcacaacctaataagcgcatgaactaattgcttgcgtgtgtagttaagtaccgatcggtaattttatattgcgagtaaataaatggacctgtagtggtggagtaaataatccctgctgttcggtgttcttatcgcttctcgtatagatgttatatagagtacattttctttctgaatcctacgtttttcaagtgtttttgaattaattcctgtgaaatttctatatcattcgtgtaaaatttctgggttccaaaaaagatcatagcctatctttgtgtatgcatggacgggtttggctttgactaggctaagagcatgcacaacctatatagatatttaggacattgtccacagtttctagtttcttgtttgattcacctacatttagctaaacagacagtttgcactgtctgcaaaaactatttaatgcttaatcaagcaactcggtaactaagtttcagattcaacaaaatacaaaaggtgctagaggattgatttggtatactggcgtaaaagatatactcggtagctgaccataattagcttcaagtgcaaacatatcctcttctttttaatagtcataaatagtttcattaaagtgaggtggcttaccaacatgattagttgccatctttacatcatgagttgctaagccttgaagttgatagttgcatggttccgataccatacaattcaaaggatgtagatggctagcggggataaataccctataattttttttacaaaccacaaacaatagagcaaattgattagtatgtattgaaaccccaagaactactactttctctagcattaaggttccctttggcagggctatctagacagctcctcctctggctcttcgtgaagccgtgtcaaatggtcttaaaaaatggctcctcatcgagagccatcaaggagctagatttgttttgctatcgggagatgaagcatcagaaaacaagcttctactggttttttctatcccacacacaataatatttcacaaagttacagtccctatcatagttttcccgtgaaaaatcgttttaccaaatgaattgcaaaacggcgctgactcctctagagaagccagaagagccgaacccgttttgagaataatcgaagccataccaaagggggcctaattcatccaagcaagcctcctacacaagt

SEQ ID NO: 758 - protein, 609 aa, Zea mays
MAALATSQLVATRAGLGVPDASTFRRGAAQGLRGGRTASAADTLSMRTSARAAPRLQHQQQQQARRGARFPSLVVCASAGMNVVFVGAEMAPWSKTGGLGDVLGGLPPAMAANGHRVMVVSPRYDQYKDAWDTSVVSEIKMGDRYETVRFFHCYKRGVDRVFVDHPLFLERVWGKTEEKIYGPDAGTDYRDNQLRFSLLCQAALEAPRILSLNNNPYFSGPYGEDVVFVCNDWHTGPLSCYLKSNYQSHGIYRDAKTAFCIHNISYQGRFAFSDYPELNLPERFKSSFDFIDGYEKPVEGRKINWMKAGILEADRVLTVSPYYAEELISGIARGCELDNIMRLTGITGIVNGMDVSEWDPSRDKYIAVKYDVSTAVEAKALNKEALQAEVGLPVDRNIPLVAFIGRLEEQKGPDVMAAAIPQLMEMVEDVQIVLLGTGKKKFERMLMSAEEKFPGKVRAVVKFNAALAHHIMAGADVLAVTSRFEPCGLIQLQGMRYGTPCACASTGGLVDTIIEGKTGFHMGRLSVDCNVVEPADVKKVATTLQRAIKVVGTPAYEEMVRNCMIQDLSWKGPAKNWENVLLSLGVAGGEPGVEGEEIAPLAKENVAAP

SEQ ID NO: 759 - DNA, 2576 bp, Zea mays
tccaaaagtacgtccattgaatggtggagtaaagagtcatttgacctctcagaataaaattaaaatgagaataagtaagaataaaacatctctgttctcaaatctaggccatacaaacattgggtattactaaaaaatagctaatgccatctttcaacatttggaagttaaaaccaaccaatcctcactcattcccaagaaatattggatcatatttaacattttgtgtcacttacaaaattggcttaatcttttatgcggcaatgccaaccttttttagcagggtgccacttgtaacatgaaaactataactattttcaaatagtaccttgaaattcgcattctatttttatgcattcttcaaaattgacacaaattatactaggagaattcaattcattcttgccataacatattctaatgcaaatattaagtagattgctcaacatcggtatacatcttttggacgattaattagtattgtctcactacattctttgttttagcagttcattaataatgcctcaatagcatacttcattttaggaactttatgaaaattgtcttaaaatagggccaagtcacaaatccacttcaaaggtgactcttcatttcttacttcctatcttcctattttagcagggtgccacttgtaacatgaaaactataactattttcaaatagtaccttgaaattcgcattctatttttatgcattcttcaaaattgacacaaattatactaggagaattcaatacattcttgccataacatattctaatgcaaatattaagtagattgctcaacatcggtatacatcttttggacgattaattagtattgtctcactacattctttgttttagcagttcattaataatgcctcaatagcatacttcattttaggatgaaaattgtcttgaaatagggccaagtcacaaatccacttcaaaggtgactcttcatttcttacttcctatctttgcttgtttttgtatatatatatgtgtggatggttgagtgatgttcctacaccactacaccactccttagacacatatatggaaaatagcttcactgtctagattccatggcatcaaggatgggaatggtggctattatgtcactatttgtttacgctattgttgttccaacgtcagttaatgctaatgcgtggcagactgatgataaaccaggtgttaatagaaacatggagatgcaacaacaacaaggtggatttattggccatcgtccaagacttgcatcttttaatagggcatcaaatcaagagggtgatcgaaaaagaactgtgcctagcgggccaaaccacaaacataacaacatcccatcgcatacccctcatcatccaccatcatatgtccaagctctttatgaagatgatagaactataacatctcctggtccgtccaaatcgataggccctccaccattaccagatagatactagttcatgcaaaagtagtgagtgtttatacacctatgccaatgaataacttctaactacccacatgtactggcctggtgtttggtaaacatgaagcaataatttcctcttatcaaaatacgggtctcaagctgcatgtgaaaaatgattttttttgaagtgaatgaaaaatgataaatatgaagcagtaaattttccagttgaaaaagtacatctctattattaacgataacctatatatcaatctacaatgcgctcatctgcatctcgatgcatactttcatcattttatgtttgcaatgtactttaatggtaagaaggattagattgttcttgttttcctcttattcttacctttttttcaaaattatcagtttccaatgtctgaatatgcaatgcattataaaccctagtcagcatatatcaagtcgatatatattgctatatgtttaagaactggtgttgagtatgtctactcaacatattttttagctattggatcgagcagtttagtaaaggtaaactacatttctctatcttcaagttgtattttccaaccttaaattatgaaatcgagtaacgctccactccaactgttgaaagggaacaaatttggtctccggactgatttcattggtggttctctattttttaaaacaacaaaaaaacatatttgttctctgaaaattgataattaattaatcataaattagaaaaaaaaactatatgaaactagttatagttttcttctaaaattattgtctgtctgttggtgctctagttatagagttataacatgaaaactatagccattttcaaatagtgccttgaaattcgtttttgtttttagccattcttcaaaattgccacaaaaccaggagaatttaatacattcacgccataacatattctagtccaaatgttaagtggattgctcaatataattatacttcttttggacgattcattagtactgcctcgttgcatactttgttttagcagttcatcaataatgcttcactagcatacttcatgttaggaacttgattaaaactgccttaagaacatggcaaagtgataaatccacttcaaaggcaattattaatttctta

SEQ ID NO: 760 - protein, 125 aa, Zea mays
MASRMGMVAIMSLFVYAIVVPTSVNANAWQTDDKPGVNRNMEMQQQQGGFIGHRPRLASFNRASNQEGDRKRTVPSGPNHKHNNIPSHTPHHPPSYVQALYEDDRTITSPGPSKSIGPPPLPDRY

SEQ ID NO: 761 - DNA, 3 bp, Zea mays
  misc_feature (1)..(3): n is a, c, g, or t
nnn

SEQ ID NO: 762 - protein, 176 aa, Zea mays
MKLLQALCPLVILLACSTSNASVLQDACKSFAAKIPDTGYAYCIKFFQADRGSAGADKRGLAAIAVRIMGAAAKSTASHIAALRASEKDKERLACLSDCSEVYAQAVDQTGVAAKGIASGTPRGRADAVMALSTVEDAPGTCEQGFQDLSVRSPLASEDAGFRKDASIALSVTAAL

SEQ ID NO: 763 - DNA, 8 bp, Artificial Sequence
  synthetic construct
cacgtggc

SEQ ID NO: 764 - DNA, 8 bp, Artificial Sequence
  synthetic construct
yacgtggc

SEQ ID NO: 765 - DNA, 8 bp, Artificial Sequence
  synthetic construct
bacgtgkm

SEQ ID NO: 766 - DNA, 10 bp, Artificial Sequence
  synthetic construct
gacacgtaga

SEQ ID NO: 767 - DNA, 14 bp, Artificial Sequence
  synthetic construct
ttdccwwwwwwggh

SEQ ID NO: 768 - DNA, 11 bp, Artificial Sequence
  synthetic construct
ccatttttagt

SEQ ID NO: 769 - DNA, 10 bp, Artificial Sequence
  synthetic construct
ccatttttgg

SEQ ID NO: 770 - DNA, 18 bp, Artificial Sequence
  synthetic construct
  misc_feature (1)..(1): n is a, c, g, or t
  misc_feature (11)..(12): n is a, c, g, or t
  misc_feature (18)..(18): n is a, c, g, or t
nttdccwwwwnnggwaan

SEQ ID NO: 771 - DNA, 18 bp, Artificial Sequence
  synthetic construct
  misc_feature (1)..(2): n is a, c, g, or t
  misc_feature (4)..(4): n is a, c, g, or t
  misc_feature (18)..(18): n is a, c, g, or t
nnwnccawwwwtrgwwan

SEQ ID NO: 772 - DNA, 16 bp, Artificial Sequence
  synthetic construct
ttwcyawwwwtrgwaa

SEQ ID NO: 773 - DNA, 10 bp, Artificial Sequence
  synthetic construct
ccatttttag

SEQ ID NO: 774 - DNA, 10 bp, Artificial Sequence
  synthetic construct
ccatttttgg

SEQ ID NO: 775 - DNA, 6 bp, Artificial Sequence
  synthetic construct
tgtctc

SEQ ID NO: 776 - DNA, 6 bp, Artificial Sequence
  synthetic construct
tgtctc

SEQ ID NO: 777 - DNA, 9 bp, Artificial Sequence
  synthetic construct
caatwattg

SEQ ID NO: 778 - DNA, 9 bp, Artificial Sequence
  synthetic construct
caatsattg

SEQ ID NO: 779 - DNA, 9 bp, Artificial Sequence
  synthetic construct
  misc_feature (5)..(5): n is a, c, g, or t
caatnattg

SEQ ID NO: 780 - DNA, 9 bp, Artificial Sequence
  synthetic construct
caattatta

SEQ ID NO: 781 - DNA, 7 bp, Artificial Sequence
  synthetic construct
ctaacca

SEQ ID NO: 782 - DNA, 6 bp, Artificial Sequence
  synthetic construct
cacatg

SEQ ID NO: 783 - DNA, 6 bp, Artificial Sequence
  synthetic construct
ggttaa

SEQ ID NO: 784 - DNA, 10 bp, Artificial Sequence
  synthetic construct
ccwwwwwwgg

SEQ ID NO: 785 - DNA, 18 bp, Artificial Sequence
  synthetic construct
gtttacataaatggaaaa

SEQ ID NO: 786 - DNA, 18 bp, Artificial Sequence
  synthetic construct
cttacctttcatggatta

SEQ ID NO: 787 - DNA, 18 bp, Artificial Sequence
  synthetic construct
ctttccatttttagtaac

SEQ ID NO: 788 - DNA, 8 bp, Artificial Sequence
  synthetic construct
tggccgac

SEQ ID NO: 789 - DNA, 8 bp, Artificial Sequence
  synthetic construct
ccacgtgg

SEQ ID NO: 790 - DNA, 8 bp, Artificial Sequence
  synthetic construct
aamaatct

SEQ ID NO: 791 - DNA, 10 bp, Artificial Sequence
  synthetic construct
aaacaatcta

SEQ ID NO: 792 - DNA, 15 bp, Artificial Sequence
  synthetic construct
aaaaaaaatctatga

SEQ ID NO: 793 - DNA, 7 bp, Artificial Sequence
  synthetic construct
  misc_feature (5)..(6): n is a, c, g, or t
acacnng

SEQ ID NO: 794 - DNA, 9 bp, Artificial Sequence
  synthetic construct
taccgacat

SEQ ID NO: 795 - DNA, 9 bp, Artificial Sequence
  synthetic construct
taccgacat

SEQ ID NO: 796 - DNA, 9 bp, Artificial Sequence
  synthetic construct
  misc_feature (8)..(8): n is a, c, g, or t
drccgacnw

SEQ ID NO: 797 - DNA, 8 bp, Artificial Sequence
  synthetic construct
tttcccgc

SEQ ID NO: 798 - DNA, 8 bp, Artificial Sequence
  synthetic construct
tttcccgc

SEQ ID NO: 799 - DNA, 9 bp, Artificial Sequence
  synthetic construct
tctcccgcc

SEQ ID NO: 800 - DNA, 23 bp, Artificial Sequence
  synthetic construct
ttcaagggggcatgtatcttgaa

SEQ ID NO: 801 - DNA, 23 bp, Artificial Sequence
  synthetic construct
ttcaagggggcatgtatcttgaa

SEQ ID NO: 802 - DNA, 23 bp, Artificial Sequence
  synthetic construct
ttcaagggggcatgtatcttgaa

SEQ ID NO: 803 - DNA, 29 bp, Artificial Sequence
  synthetic construct
ggattcaagggggcatgtatcttgaatcc

SEQ ID NO: 804 - DNA, 11 bp, Artificial Sequence
  synthetic construct
taagagccgcc

SEQ ID NO: 805 - DNA, 6 bp, Artificial Sequence
  synthetic construct
gccgcc

SEQ ID NO: 806 - DNA, 9 bp, Artificial Sequence
  synthetic construct
aaaatatct

SEQ ID NO: 807 - DNA, 6 bp, Artificial Sequence
  synthetic construct
wgatar

SEQ ID NO: 808 - DNA, 8 bp, Artificial Sequence
  synthetic construct
ccacgtgg

SEQ ID NO: 809 - DNA, 6 bp, Artificial Sequence
  synthetic construct
cacgtg

SEQ ID NO: 810 - DNA, 6 bp, Artificial Sequence
  synthetic construct
gccgcc

SEQ ID NO: 811 - DNA, 15 bp, Artificial Sequence
  synthetic construct
tgtgtggttaatatg

SEQ ID NO: 812 - DNA, 6 bp, Artificial Sequence
  synthetic construct
ccgtcg

SEQ ID NO: 813 - DNA, 10 bp, Artificial Sequence
  synthetic construct
  misc_feature (5)..(6): n is a, c, g, or t
agaannttct

SEQ ID NO: 814 - DNA, 6 bp, Artificial Sequence
  synthetic construct
gataag

SEQ ID NO: 815 - DNA, 10 bp, Artificial Sequence
  synthetic construct
cgtcaatgaa

SEQ ID NO: 816 - DNA, 13 bp, Artificial Sequence
  synthetic construct
catacgtcgtcaa

SEQ ID NO: 817 - DNA, 8 bp, Artificial Sequence
  synthetic construct
taaatgya

SEQ ID NO: 818 - DNA, 10 bp, Artificial Sequence
  synthetic construct
acgtcataga

SEQ ID NO: 819 - DNA, 10 bp, Artificial Sequence
  synthetic construct
tctacgtcac

SEQ ID NO: 820 - DNA, 7 bp, Artificial Sequence
  synthetic construct
accgaca

SEQ ID NO: 821 - DNA, 12 bp, Artificial Sequence
  synthetic construct
tctaacctacca

SEQ ID NO: 822 - DNA, 8 bp, Artificial Sequence
  synthetic construct
maccwamc

SEQ ID NO: 823 - DNA, 8 bp, Artificial Sequence
  synthetic construct
mtccwacc

SEQ ID NO: 824 - DNA, 9 bp, Artificial Sequence
  synthetic construct
taactsgtt

SEQ ID NO: 825 - DNA, 8 bp, Artificial Sequence
  synthetic construct
taactaac

SEQ ID NO: 826 - DNA, 7 bp, Artificial Sequence
  synthetic construct
amcwamc

SEQ ID NO: 827 - DNA, 9 bp, Artificial Sequence
  synthetic construct
agatcgacg

SEQ ID NO: 828 - DNA, 26 bp, Artificial Sequence
  synthetic construct
atcttatgtcattgatgacgacctcc

SEQ ID NO: 829 - DNA, 11 bp, Artificial Sequence
  synthetic construct
tacacttttgg

SEQ ID NO: 830 - DNA, 20 bp, Artificial Sequence
  synthetic construct
tgacgyaagsrmtkacgymm

SEQ ID NO: 831 - DNA, 8 bp, Artificial Sequence
  synthetic construct
cgcggatc

SEQ ID NO: 832 - DNA, 8 bp, Artificial Sequence
  synthetic construct
gtgatcac

SEQ ID NO: 833 - DNA, 20 bp, Artificial Sequence
  synthetic construct
ttggttttgatcaaaaccaa

SEQ ID NO: 834 - DNA, 15 bp, Artificial Sequence
  synthetic construct
taattgactcaatta

SEQ ID NO: 835 - DNA, 5 bp, Artificial Sequence
  synthetic construct
caaca

SEQ ID NO: 836 - DNA, 6 bp, Artificial Sequence
  synthetic construct
cacctg

SEQ ID NO: 837 - DNA, 8 bp, Artificial Sequence
  synthetic construct
catgcatg

SEQ ID NO: 838 - DNA, 9 bp, Artificial Sequence
  synthetic construct
  misc_feature (2)..(2): n is a, c, g, or t
tncgtacaa

SEQ ID NO: 839 - DNA, 6 bp, Artificial Sequence
  synthetic construct
actttg

SEQ ID NO: 840 - DNA, 16 bp, Artificial Sequence
  synthetic construct
aggggcataatggtaa

SEQ ID NO: 841 - DNA, 9 bp, Artificial Sequence
  synthetic construct
aaaccctaa

SEQ ID NO: 842 - DNA, 8 bp, Artificial Sequence
  synthetic construct
tgacgtgg

SEQ ID NO: 843 - DNA, 5 bp, Artificial Sequence
  synthetic construct
ttgac

SEQ ID NO: 844 - DNA, 8 bp, Artificial Sequence
  synthetic construct
atacgtgt

SEQ ID NO: 845 - DNA, 16 bp, Artificial Sequence
  synthetic construct
aaaacagaataggaaa

SEQ ID NO: 846 - DNA, 8 bp, Artificial Sequence
  synthetic construct
aaattaaa

SEQ ID NO: 847 - DNA, 8 bp, Artificial Sequence
  synthetic construct
aaattagt

SEQ ID NO: 848 - DNA, 8 bp, Artificial Sequence
  synthetic construct
actaattt

SEQ ID NO: 849 - DNA, 12 bp, Artificial Sequence
  synthetic construct
ccaatttaatgg

SEQ ID NO: 850 - DNA, 6 bp, Artificial Sequence
  synthetic construct
actcat

SEQ ID NO: 851 - DNA, 19 bp, Artificial Sequence
  synthetic construct
cttaaaccctaggggtaat

SEQ ID NO: 852 - DNA, 10 bp, Artificial Sequence
  synthetic construct
ttwtactagt

SEQ ID NO: 853 - DNA, 9 bp, Artificial Sequence
  synthetic construct
ataaaacgt

SEQ ID NO: 854 - DNA, 9 bp, Artificial Sequence
  synthetic construct
tgtatatat

SEQ ID NO: 855 - DNA, 9 bp, Artificial Sequence
  synthetic construct
ctcctaatt

SEQ ID NO: 856 - DNA, 10 bp, Artificial Sequence
  synthetic construct
ttgcatgact

SEQ ID NO: 857 - DNA, 6 bp, Artificial Sequence
  synthetic construct
agccac

SEQ ID NO: 858 - DNA, 5 bp, Artificial Sequence
  synthetic construct
gggcc

SEQ ID NO: 859 - DNA, 9 bp, Artificial Sequence
  synthetic construct
ctcaagtga

SEQ ID NO: 860 - DNA, 9 bp, Artificial Sequence
  synthetic construct
gtatgatgg

SEQ ID NO: 861 - DNA, 7 bp, Artificial Sequence
  synthetic construct
gagtgag

SEQ ID NO: 862 - DNA, 8 bp, Artificial Sequence
  synthetic construct
cacgtggc

SEQ ID NO: 863 - DNA, 34 bp, Artificial Sequence; identical to SEQ ID NO: 267
  synthetic construct

SEQ ID NO: 864 - DNA, 34 bp, Artificial Sequence; identical to SEQ ID NO: 268
  synthetic construct

SEQ ID NO: 865 - DNA, 34 bp, Artificial Sequence; identical to SEQ ID NO: 306
  synthetic construct

SEQ ID NO: 866 - DNA, 34 bp, Artificial Sequence; identical to SEQ ID NO: 307
  synthetic construct

SEQ ID NO: 867 - DNA, 68 bp, Artificial Sequence; identical to SEQ ID NO: 309
  synthetic construct

SEQ ID NO: 868 - DNA, 68 bp, Artificial Sequence; identical to SEQ ID NO: 310
  synthetic construct

SEQ ID NO: 869 - DNA, 100 bp, Artificial Sequence; identical to SEQ ID NO: 311
  synthetic construct

SEQ ID NO: 870 - DNA, 100 bp, Artificial Sequence; identical to SEQ ID NO: 312
  synthetic construct

SEQ ID NO: 871 - DNA, 34 bp, Artificial Sequence; identical to SEQ ID NO: 316
  synthetic construct

SEQ ID NO: 872 - DNA, 34 bp, Artificial Sequence; identical to SEQ ID NO: 317
  synthetic construct

SEQ ID NO: 873 - DNA, 34 bp, Artificial Sequence; identical to SEQ ID NO: 318
  synthetic construct
  misc_feature (14)..(16): n is a, c, g, or t
  misc_feature (19)..(21): n is a, c, g, or t

SEQ ID NO: 874 - DNA, 34 bp, Artificial Sequence; identical to SEQ ID NO: 319
  synthetic construct

SEQ ID NO: 875 - DNA, 34 bp, Artificial Sequence; identical to SEQ ID NO: 320
  synthetic construct

SEQ ID NO: 876 - DNA, 34 bp, Artificial Sequence; identical to SEQ ID NO: 321
  synthetic construct

SEQ ID NO: 877 - DNA, 34 bp, Artificial Sequence; identical to SEQ ID NO: 322
  synthetic construct

SEQ ID NO: 878 - DNA, 34 bp, Artificial Sequence; identical to SEQ ID NO: 323
  synthetic construct

SEQ ID NO: 879 - DNA, 34 bp, Artificial Sequence; identical to SEQ ID NO: 324
  synthetic construct

SEQ ID NO: 880 - DNA, 34 bp, Artificial Sequence; identical to SEQ ID NO: 324
  synthetic construct

SEQ ID NO: 881 - DNA, 34 bp, Artificial Sequence; identical to SEQ ID NO: 326
  synthetic construct
  misc_feature (14)..(16): n is a, c, g, or t
  misc_feature (19)..(21): n is a, c, g, or t

SEQ ID NO: 882 - DNA, 34 bp, Artificial Sequence; identical to SEQ ID NO: 327
  synthetic construct
  misc_feature (14)..(16): n is a, c, g, or t
  misc_feature (19)..(21): n is a, c, g, or t

SEQ ID NO: 883 - DNA, 20 bp, Artificial Sequence
  synthetic construct
gtgctctctctcttctgtca

SEQ ID NO: 884 - DNA, 20 bp, Artificial Sequence
  synthetic construct
ctgctctctctcttctgtca

SEQ ID NO: 885 - DNA, 20 bp, Artificial Sequence
  synthetic construct
ttgcttactctcttctgtca

SEQ ID NO: 886 - DNA, 20 bp, Artificial Sequence
  synthetic construct
ccgctctctctcttctgtca

SEQ ID NO: 887 - DNA, 21 bp, Artificial Sequence
  synthetic construct
tggagctcccttcattccaat

SEQ ID NO: 888 - DNA, 21 bp, Artificial Sequence
  synthetic construct
tcgagttcccttcattccaat

SEQ ID NO: 889 - DNA, 21 bp, Artificial Sequence
  synthetic construct
atgagctctcttcaaaccaaa

SEQ ID NO: 890 - DNA, 21 bp, Artificial Sequence
  synthetic construct
tggagctcccttcattccaag

SEQ ID NO: 891 - DNA, 21 bp, Artificial Sequence
  synthetic construct
tagagcttccttcaaaccaaa

SEQ ID NO: 892 - DNA, 21 bp, Artificial Sequence
  synthetic construct
tggagctccattcgatccaaa

SEQ ID NO: 893 - DNA, 21 bp, Artificial Sequence
  synthetic construct
agcagctcccttcaaaccaaa

SEQ ID NO: 894 - DNA, 21 bp, Artificial Sequence
  synthetic construct
cagagctcccttcactccaat

SEQ ID NO: 895 - DNA, 21 bp, Artificial Sequence
  synthetic construct
tggagctcccttcactccaat

SEQ ID NO: 896 - DNA, 21 bp, Artificial Sequence
  synthetic construct
tggagctcccttcactccaag

SEQ ID NO: 897 - DNA, 21 bp, Artificial Sequence
  synthetic construct
tggagctccctttaatccaat

SEQ ID NO: 898 - DNA, 21 bp, Artificial Sequence
  synthetic construct
ttgggatgaagcctggtccgg

SEQ ID NO: 899 - DNA, 21 bp, Artificial Sequence
  synthetic construct
ctgggatgaagcctggtccgg

SEQ ID NO: 900 - DNA, 21 bp, Artificial Sequence
  synthetic construct
ctggaatgaagcctggtccgg

SEQ ID NO: 901 - DNA, 20 bp, Artificial Sequence
  synthetic construct
cgggatgaagcctggtccgg

SEQ ID NO: 902 - DNA, 21 bp, Artificial Sequence
  synthetic construct
gagatcaggctggcagcttgt

SEQ ID NO: 903 - DNA, 21 bp, Artificial Sequence
  synthetic construct
tagatcaggctggcagcttgt

SEQ ID NO: 904 - DNA, 21 bp, Artificial Sequence
  synthetic construct
aagatcaggctggcagcttgt

SEQ ID NO: 905 - DNA, 20 bp, Artificial Sequence
  synthetic construct
gtgctctctctcttctgtca

SEQ ID NO: 906 - DNA, 20 bp, Artificial Sequence
  synthetic construct
ctgctctctctcttctgtca

SEQ ID NO: 907 - DNA, 20 bp, Artificial Sequence
  synthetic construct
ttgcttactctcttctgtca

SEQ ID NO: 908 - DNA, 20 bp, Artificial Sequence
  synthetic construct
ccgctctctctcttctgtca

SEQ ID NO: 909 - DNA, 21 bp, Artificial Sequence
  synthetic construct
tggcatgcagggagccaggca

SEQ ID NO: 910 - DNA, 21 bp, Artificial Sequence
  synthetic construct
aggaatacagggagccaggca

SEQ ID NO: 911 - DNA, 21 bp, Artificial Sequence
  synthetic construct
gggtttacagggagccaggca

SEQ ID NO: 912 - DNA, 21 bp, Artificial Sequence
  synthetic construct
aggcatacagggagccaggca

SEQ ID NO: 913 - DNA, 21 bp, Artificial Sequence
  synthetic construct
aaacaatgcgatccctttgga

SEQ ID NO: 914 - DNA, 21 bp, Artificial Sequence
  synthetic construct
agaccatgcgatccctttgga

SEQ ID NO: 915 - DNA, 21 bp, Artificial Sequence
  synthetic construct
ggtcagagcgatccctttggc

SEQ ID NO: 916 - DNA, 21 bp, Artificial Sequence
  synthetic construct
agacaatgcgatccctttgga

SEQ ID NO: 917 - DNA, 22 bp, Artificial Sequence
  synthetic construct
tcgttcaagaaagcctgtggaa

SEQ ID NO: 918 - DNA, 21 bp, Artificial Sequence
  synthetic construct
cgttcaagaaagcctgtggaa

SEQ ID NO: 919 - DNA, 22 bp, Artificial Sequence
  synthetic construct
tcgttcaagaaagcatgtggaa

SEQ ID NO: 920 - DNA, 22 bp, Artificial Sequence
  synthetic construct
acgttcaagaaagcttgtggaa

SEQ ID NO: 921 - DNA, 21 bp, Artificial Sequence
  synthetic construct
cgttcaagaaagcctgtggaa

SEQ ID NO: 922 - DNA, 300 bp, Artificial Sequence
  synthetic construct
ggacaacaagcaccttcttgccttgcaaggcctcccttccctatggtagccacttgagtggatgacttcaccttaaagctattgattccctaagtgccagacataataggctatacattctctctggtggcaacaatgagccattttggttggtgtggtagtctattattgagttttttttggcaccgtactcccatggagagtagaagacaaactcttcaccgttgtagtcgttgatggtattggtggtgacgacatccttggtgtgcatgcactggtgagtcactgttgtactcggcg

SEQ ID NO: 923 - DNA, 104 bp, Artificial Sequence
  synthetic construct
ggacaacaagcaccttcttgccttgcaaggcctcccttccctatggtagccacttgagtggatgacttcaccttaaagctatcgattccctaagtgccagacat

SEQ ID NO: 924 - DNA, 80 bp, Artificial Sequence
  synthetic construct
ctcttcaccgttgtagtcgttgatggtattggtggtgacgacatccttggtgtgcatgcactggtgagtcactgttgtac

SEQ ID NO: 925 - DNA, 184 bp, Artificial Sequence
  synthetic construct
ggacaacaagcaccttcttgccttgcaaggcctcccttccctatggtagccacttgagtggatgacttcaccttaaagctatcgattccctaagtgccagacatctcttcaccgttgtagtcgttgatggtattggtggtgacgacatccttggtgtgcatgcactggtgagtcactgttgtac

SEQ ID NO: 926 - DNA, 184 bp, Artificial Sequence
  synthetic construct
ctcttcaccgttgtagtcgttgatggtattggtggtgacgacatccttggtgtgcatgcactggtgagtcactgttgtacggacaacaagcaccttcttgccttgcaaggcctcccttccctatggtagccacttgagtggatgacttcaccttaaagctatcgattccctaagtgccagacat

SEQ ID NO: 927 - DNA, 16 bp, Artificial Sequence
  synthetic construct
acgtaagcgcttacgt

SEQ ID NO: 928 - DNA, 12 bp, Artificial Sequence
  synthetic construct
gtaagcgcttac

SEQ ID NO: 929 - DNA, 43 bp, Artificial Sequence; identical to SEQ ID NO: 349
  synthetic construct

SEQ ID NO: 930 - DNA, 43 bp, Artificial Sequence; identical to SEQ ID NO: 350
  synthetic construct

SEQ ID NO: 931 - RNA, 34 nt, Artificial Sequence; identical to SEQ ID NO: 351
  synthetic construct

SEQ ID NO: 932 - DNA, 38 bp, Artificial Sequence; identical to SEQ ID NO: 353
  synthetic construct

SEQ ID NO: 933 - DNA, 38 bp, Artificial Sequence; identical to SEQ ID NO: 354
  synthetic construct

SEQ ID NO: 934 - DNA, 117 bp, Artificial Sequence; identical to SEQ ID NO: 356
  synthetic construct

SEQ ID NO: 935 - DNA, 15 bp, Artificial Sequence
  synthetic construct
aaaaaaaaaaaaaaa

SEQ ID NO: 936 - DNA, 25 bp, Artificial Sequence
  synthetic construct
cacatacacacaaaaataaaaaaga

SEQ ID NO: 937 - DNA, 16 bp, Artificial Sequence
  synthetic construct
gaatatatatatattc

SEQ ID NO: 938 - DNA, 618 bp, Artificial Sequence; identical to SEQ ID NO: 376
  synthetic construct

SEQ ID NO: 939 - DNA, 84 bp, Artificial Sequence
  synthetic construct
tactccctccgtttctttttattagtcgctggatagtgcaattttgcactatccagcgactaataaaaagaaacggagggagta

SEQ ID NO: 940 - DNA, 84 bp, Artificial Sequence
  synthetic construct
tactccctccgtttctttttattagtcgctggatagtgcaaaattgcactatccagcgactaataaaaagaaacggagggagta

SEQ ID NO: 941 - DNA, 28 bp, Artificial Sequence
  synthetic construct
acacgtgacacgtgacacgtgacacgtg

SEQ ID NO: 942 - DNA, 36 bp, Artificial Sequence; identical to SEQ ID NO: 378
  synthetic construct

SEQ ID NO: 943 - DNA, 36 bp, Artificial Sequence
  synthetic construct
aattttaattttaattttaattttaattttaatttt

SEQ ID NO: 944 - DNA, 36 bp, Artificial Sequence
  synthetic construct
tctctttctctttctctttctctttctctttctctt

SEQ ID NO: 945 - DNA, 92 bp, Artificial Sequence; identical to SEQ ID NO: 377
  synthetic construct

SEQ ID NO: 946 - DNA, 92 bp, Artificial Sequence; identical to SEQ ID NO: 380
  synthetic construct

SEQ ID NO: 947 - DNA, 8 bp, Artificial Sequence
  synthetic construct
ctccdccd

SEQ ID NO: 948 - DNA, 9 bp, Artificial Sequence
  synthetic construct
hkcmrmckm

SEQ ID NO: 949 - DNA, 11 bp, Artificial Sequence
  synthetic construct
  misc_feature (8)..(9): n is a, c, g, or t
sacgtggnnvw

SEQ ID NO: 950 - DNA, 9 bp, Artificial Sequence
  synthetic construct
araragarr

SEQ ID NO: 951 - DNA, 9 bp, Artificial Sequence
  synthetic construct
cahcamcah

SEQ ID NO: 952 - DNA, 9 bp, Artificial Sequence
  synthetic construct
raacccwar

SEQ ID NO: 953 - DNA, 8 bp, Artificial Sequence
  synthetic construct
  misc_feature (2)..(2): n is a, c, g, or t
  misc_feature (7)..(7): n is a, c, g, or t
gnatatnc

SEQ ID NO: 954 - RNA, 20 nt, Zea mays
gugcucucucucuucuguca

SEQ ID NO: 955 - RNA, 20 nt, Zea mays
cugcucucucucuucuguca

SEQ ID NO: 956 - RNA, 20 nt, Zea mays
uugcuuacucucuucuguca

SEQ ID NO: 957 - RNA, 20 nt, Zea mays
ccgcucucucucuucuguca

SEQ ID NO: 958 - RNA, 21 nt, Zea mays
uggagcucccuucauuccaau

SEQ ID NO: 959 - RNA, 21 nt, Zea mays
ucgaguucccuucauuccaau

SEQ ID NO: 960 - RNA, 21 nt, Zea mays
augagcucucuucaaaccaaa

SEQ ID NO: 961 - RNA, 21 nt, Zea mays
uggagcucccuucauuccaag

SEQ ID NO: 962 - RNA, 21 nt, Zea mays
uagagcuuccuucaaaccaaa

SEQ ID NO: 963 - RNA, 21 nt, Zea mays
uggagcuccauucgauccaaa

SEQ ID NO: 964 - RNA, 21 nt, Zea mays
agcagcucccuucaaaccaaa

SEQ ID NO: 965 - RNA, 21 nt, Zea mays
cagagcucccuucacuccaau

SEQ ID NO: 966 - RNA, 21 nt, Zea mays
uggagcucccuucacuccaau

SEQ ID NO: 967 - RNA, 21 nt, Zea mays
uggagcucccuucacuccaag

SEQ ID NO: 968 - RNA, 21 nt, Zea mays
uggagcucccuuuaauccaau

SEQ ID NO: 969 - RNA, 21 nt, Zea mays
uugggaugaagccugguccgg

SEQ ID NO: 970 - RNA, 21 nt, Zea mays
cugggaugaagccugguccgg

SEQ ID NO: 971 - RNA, 21 nt, Zea mays
cuggaaugaagccugguccgg

SEQ ID NO: 972 - RNA, 20 nt, Zea mays
cgggaugaagccugguccgg

SEQ ID NO: 973 - RNA, 21 nt, Zea mays
gagaucaggcuggcagcuugu

SEQ ID NO: 974 - RNA, 21 nt, Zea mays
uagaucaggcuggcagcuugu

SEQ ID NO: 975 - RNA, 21 nt, Zea mays
aagaucaggcuggcagcuugu

SEQ ID NO: 976 - RNA, 20 nt, Zea mays
gugcucucucucuucuguca

SEQ ID NO: 977 - RNA, 20 nt, Zea mays
cugcucucucucuucuguca

SEQ ID NO: 978 - RNA, 20 nt, Zea mays
uugcuuacucucuucuguca

SEQ ID NO: 979 - RNA, 20 nt, Zea mays
ccgcucucucucuucuguca

SEQ ID NO: 980 - RNA, 21 nt, Zea mays
uggcaugcagggagccaggca

SEQ ID NO: 981 - RNA, 21 nt, Zea mays
aggaauacagggagccaggca

SEQ ID NO: 982 - RNA, 21 nt, Zea mays
ggguuuacagggagccaggca

SEQ ID NO: 983 - RNA, 21 nt, Zea mays
aggcauacagggagccaggca

SEQ ID NO: 984 - RNA, 21 nt, Zea mays
aaacaaugcgaucccuuugga

SEQ ID NO: 985 - RNA, 21 nt, Zea mays
agaccaugcgaucccuuugga

SEQ ID NO: 986 - RNA, 21 nt, Zea mays
ggucagagcgaucccuuuggc

SEQ ID NO: 987 - RNA, 21 nt, Zea mays
agacaaugcgaucccuuugga

SEQ ID NO: 988 - RNA, 22 nt, Zea mays
ucguucaagaaagccuguggaa

SEQ ID NO: 989 - RNA, 21 nt, Zea mays
cguucaagaaagccuguggaa

SEQ ID NO: 990 - RNA, 22 nt, Zea mays
ucguucaagaaagcauguggaa

SEQ ID NO: 991 - RNA, 22 nt, Zea mays
acguucaagaaagcuuguggaa

SEQ ID NO: 992 - RNA, 21 nt, Zea mays
cguucaagaaagccuguggaa

SEQ ID NO: 993 - DNA, 300 bp, Zea mays; identical to SEQ ID NO: 922

SEQ ID NO: 994 - DNA, 104 bp, Zea mays; identical to SEQ ID NO: 923

SEQ ID NO: 995 - DNA, 80 bp, Zea mays; identical to SEQ ID NO: 924

SEQ ID NO: 996 - DNA, 184 bp, Zea mays; identical to SEQ ID NO: 925

SEQ ID NO: 997 - RNA, 21 nt, Zea mays
uuagaugaccaucagcaaaca

SEQ ID NO: 998 - DNA, 500 bp, Zea mays
agcagcacggcagtagctgcgccattgcacgcctccggccggcggctgcttgtcttgctgcttctgccgcacatccgtgatccgtacgtcgtcacctcaccactcacgcacaagcacaaagagcgttaatttcttgctggagattctattctatttctatggcgtgtccctgatcgaatcctaaatcctaaacctctgtggtgcactgcagggcagaaggtgcttcgttcgttgcaggcctggcgccacgccgtaccgtgcaagcgcgtttgctgatgttcatctaattactgtataataatatctccgggcgaaagagctagcaatcgtcggcgggggaggaggggctcgattgctgctcaaggtgagttgtaattccttggctctggatttccctatctgttggctgttcatggatcatccaatggatggatggcgctccctgttctctacacctgcgtgctcttcttccctcgcctcgccggggtcttgtgtcagtt

SEQ ID NO: 999 - DNA, 21 bp, Zea mays
cgtttgctgatgttcatctaa

SEQ ID NO: 1000 - RNA, 36 nt, Artificial Sequence
  synthetic construct
caucagcaaacgcgcuugcaguuuuagagcuaugcu

SEQ ID NO: 1001 - RNA, 36 nt, Artificial Sequence
  synthetic construct
gcgaaagagcuagcaaucguguuuuagagcuaugcu

SEQ ID NO: 1002 - DNA, 600 bp, Zea mays
ttctccataaaaaaagttgagctaaacagcccctaaagtatatgtagataagcacgattctagtactaaccgcaggacttcttgagcagagcaaaagatggatactccctccgtttctttttattagtcgctggatagtgcaattttgcactatccagcgactaataaaaagaaacggagggagtattaattacagaagaactgacggggcgcatggtttccacgaggtgggcgcaccccggccacatgcatcggcgaaaacaaaatggcagtcgcgaatcgaaagctgccaagctaggccgcatgctggggatgtgtgacacacatatcattggcggtcatggcaggtcgacacgtgtaggcggacgtcatccatcgtcttcatccctatctatctatctatcactcagtacaagccattgctttcgttatcttccgaggcgggcagggcagggcaggttcttccccccttggcacgcaccgcacgcacggcttgcgtggagccaggccagctcgacgatgactacgcggccccggccccgcggcccagtcctccctcctcttcgatcctataaaagcgaggcccagtccctccatctc

SEQ ID NO: 1003 - RNA, 36 nt, Artificial Sequence
  synthetic construct
gcucugcucaagaaguccugguuuuagagcuaugcu

SEQ ID NO: 1004 - RNA, 36 nt, Artificial Sequence
  synthetic construct
uaauuacagaagaacugacgguuuuagagcuaugcu

SEQ ID NO: 1005 - RNA, 36 nt, Artificial Sequence
  synthetic construct
cagcgacuaauaaaaagaaaguuuuagagcuaugcu

SEQ ID NO: 1006 - DNA, 1592 bp, Zea mays
atggtgggtctcgtcggcggcagcacggcgcgggcggagcacgtcgtcgccaacgccggaggggaggcagagtacgtgcgccgcatgcaccgccacgcgccgaccgagcaccagtgcacctccaccctcgtcaagcacatcaaggcgcccgtccacctcgtatgtcccccctccaccccgctctttcctaccctcaacgcggctggccccggtggttcagcggttggactgcctcgcgtctgggctgctatttctcttcggatctggagtcaggagtccttcgtccgatttccaaggccttgttgggtgtctcccccccaccgacgtgttctcgtgatgttgggttaatcgcggctggcgtcaaatcgattggaagctgacgccgtcgatcgcatcgcaggtgtgggagctggtgcggaggttcgaccagccgcagcggtacaagccgttcgtcaggaactgcgtcgtgcgcggggaccagctcgaggtcggcagcctgcgcgacgtcaacgtcaagaccggcctgccggcgacgaccagcaccgagcgcctcgagcagctcgacgacgacctgcacatactcggtgtcaagttcgtcggcggggaccaccgcctccaggtccgtgctgctgccgcccgtttgttgcgtccctgcaaaaatgctctgtttcacgcgccctccttgcttgtcagtgtactccaaattatttttgggggtatgcttgctttgttaccatttctcttttttttaaattaaattgctttcttgtttccatttcactgcagtcctgatcgctggatgctatgcatgaaatgcatttgctgtgcttgcgagattgggcatttactatgagctttgtgacagttaacatcttggtcctgtttggaagctgggattgggaatcaaatccttacatggtttaggagcatccagtttgaacttaaaccattgtagacatctgctgcaataaaaacaattggcttcggtgagaggcactcatcatcagttcaaacttaaaacgagataagccatcggttgattggcctaattaccttgcttcccgtgattgttcgcctcgctgaaaggatatgctcacaacccgtactgttttgacttgttatccacatactatttaagtacgaaaggacatgcgtactactttcatttgttgttcttcgtctagtcttcagactgataatataaggtgaaaaacttcgatgtttcgcgtgctgtcaagtgattgtgaagcaaagtttctgttagtgtcaatgcgtacaggctgcaatggccatctttactcctacttgaagcatatctctgatccacactgatgatgatgagttgtgtgcgccacttttttttctttttctttcagaactactcatccatcataactgtccaccccgagagcattgacgggaggccgggcaccctggtgatcgagtcgttcgtggtcgatgtgcctgatggcaacacgaaggacgagacatgctacttcgtggaggccgtgatcaagtgcaacctcaattctctcgcagaggtatcggagcagctagcagtggagtcacctacgtcgctgatcgatcagtga

SEQ ID NO: 1007 - DNA, 594 bp, Artificial Sequence
  synthetic construct
atggtgggtctcgtcggcggcagcacggcgcgggcggagcacgtcgtcgccaacgccggaggggaggcagagtacgtgcgccgcatgcaccgccacgcgccgaccgagcaccagtgcacctccaccctcgtcaagcacatcaaggcgcccgtccacctcgtgtgggagctggtgcggaggttcgaccagccgcagcggtacaagccgttcgtcaggaactgcgtcgtgcgcggggaccagctcgaggtcggcagcctgcgcgacgtcaacgtcaagaccggcctgccggcgacgaccagcaccgagcgcctcgagcagctcgacgacgacctgcacatactcggtgtcaagttcgtcggcggggaccaccgcctccagaactactcatccatcataactgtccaccccgagagcattgacgggaggccgggcaccctggtgatcgagtcgttcgtggtcgatgtgcctgatggcaacacgaaggacgagacatgctacttcgtggaggccgtgatcaagtgcaacctcaattctctcgcagaggtatcggagcagctagcagtggagtcacctacgtcgctgatcgatcagtga

SEQ ID NO: 1008 - protein, 197 aa, Zea mays; identical to SEQ ID NO: 478

SEQ ID NO: 1009 - DNA, 594 bp, Artificial Sequence
  synthetic construct
atggtgggtctcgtcggcggcagcacggcgcgggcggagcacgtcgtcgccaacgccggaggggaggcagagtacgtgcgccgcatgcaccgccacgcgccgaccgagcaccagtgcacctccaccctcgtcaagcacatcaaggcgcccgtccacctcgtgtgggagctggtgcggaggttcgaccagccgcagcggtacaagccgttcgtcaggaactgcgtcgtgcgcggggaccagctcgaggtcggcagcctgcgcgacgtcaacgtcaagaccggcctgccggcgacgaccagcaccgagcgcctcgagcagctcgacgacgacctgcacatactcggtgtcaagttcgtcggcggggaccaccgcctccagaactactcatccatcataactgtccaccccgagagcattgacgggaggccgggcaccctggtgatcctgtcgttcgtcgtcgatgtgcctgatggcaacacgaaggacgagacatgctacttcgtggaggccgtgatcaagtgcaacctcaattctctcgcagaggtatcggagcagctagcagtggagtcacctacgtcgctgatcgatcagtga

SEQ ID NO: 1010 - RNA, 20 nt, Artificial Sequence
  synthetic construct
ccuggugaucgagucguucg

SEQ ID NO: 1011 - RNA, 135 nt, Artificial Sequence
  synthetic construct
ccuggugaucgagucguucgguuuuagagcuagaaauagcaaguuaaaauaaggcuaguccguuaucaacuugaaaaaguggcaccgagucggugcuuuuuugucgacgguaucgauaagcuugauaucgaauuc

SEQ ID NO: 1012 - RNA, 33 nt, Artificial Sequence
  synthetic construct
gucgacgguaucgauaagcuugauaucgaauuc

SEQ ID NO: 1013 - DNA, 99 bp, Artificial Sequence
  synthetic construct
gacgggaggccgggcaccctggtgatcctgtcgttcgtcgtcgatgtgcctgatggcaacacgaaggaattcgatatcaagcttatcgataccgtcgac

SEQ ID NO: 1014 - DNA, 33 bp, Artificial Sequence
  synthetic construct
gaattcgatatcaagcttatcgataccgtcgac

SEQ ID NO: 1015 - DNA, 300 bp, Zea mays
attaactagtgctgataatatatttacactgtagatttttccgataagtagaaaccaaatatttcaccgccacaaaaggcttcatcccatcagttacccatgtagcaaaaccaaaatacttgtgtgcgagaggccaagagcccaaaccaccgccaaggaaacccccagcccaccaggcgccttcctctataaataccctaactccggtggccgaagttcctcacccattcactcactcatctcaaggcctaggtagcaccgtagcagctactagaagcagctagccagaacaactcgtcc

SEQ ID NO: 1016 - RNA, 36 nt, Artificial Sequence
  synthetic construct
ugggaugaagccuuuuguggguuuuagagcuaugcu

SEQ ID NO: 1017 - RNA, 36 nt, Artificial Sequence
  synthetic construct
ccaaaauacuugugugcgagguuuuagagcuaugcu

SEQ ID NO: 1018 - RNA, 36 nt, Artificial Sequence; identical to SEQ ID NO: 1017
  synthetic construct

SEQ ID NO: 1019 - DNA, 2046 bp, Zea mays
gaggattgcagctcctggatcatatcagaatgtctgtcgctcgccaccccgggcgcactgcattatatttctggcaggtgcgcaatacaatatggcatggggggcacgtagtacggtactgccgtacagctgcgtcagcaaatgccaacttgtgtggtacagctataatctatagaaaaaagaatattatagaagtagtagaagttggcgcgtatggattaaggaaggtttggtttctagtgactaatttagtctctctattttattcaattttgttcctaaattatcaaactaaaatgaagttttgttttttttatataggataatttagagactaaaatagaataaaaatgaatggatgaaaaattagttcctaccaaccaaacaccccttaagagctacttcgagaacctcaaatctccttcgagactggaggagatgaaggtaaaaataaactaattttcccttcaatccttttaattcacaagggggtgcgggtacggaaatgtttactactatactggaaaggtgtctgaaaccgggagaaaagctttgaccagggtggacctgtttatgggatcgaagcggccgttgccccaactggcgactggcgagccaccattgcgcggacccgagattaactatactacaggagtactgtcgggttggtaccaatacgtggcttgggcaaaaagtctggcaggcgccgctgcttgtctgcggtttctatgtgccgatgccatcgcaccggaccggatcgggatgggatcagcggaacatgcgagagcgagcctgcactgcactgcatggccgcgaccgcgtcgtccatcgagccgcctatcattagttggttccactgtctcgccgccgaagcaaggcagcacagcacacatcagcattgcttcccagttcccaatgccccgtcgtcctagccgaggcgggctcagtaccaacccagctgaaactacgagagatgcgctgtgggcaggacagtggtcgagcgaggagtgtacctgtagttaacgaggattttattttactagtgcgtacgtacgtactgtacgtactatgatctctcacgtgctctggtcttatcactcgcttgattatactatgatctttttttccctccacctgctctggtcttatcgctggcacgtgcttttacacggccacttaggactactcacctcgtctcgtcatgcttatctacttcagagcgtcacggacacagcaaggaggagtacgcacacgcagcatggactgcctggagcggggtgtggtgcactaacgcccgcctaattcccggagctgcctgtgccttggacgcccatctctggtttcgcggggagaataataataatttaggcgaaacacgggaacgggtcgtgaggaaaagcctgacatgctgcattacggccggtgccgttcggaccccagttattgatgagccgagtcaccgacctgccaagaaaaggatgccggatcaagggcaggttcacctcatcttagcgcatgcaagcgtcgtccctaaccaaaacatcatcttcatgtctggccgcccgcgcagcggtcccagtgccggcgtggttaacgggagggactgggactggcagggccggctaatggccgacgtgcagtcgcctcgtatgcgtttcccgttgagccatgcatgcagcagagcagcgcgggcggccggtcctgccaccggtggatcgcggccgggcacgtcacggcccggtccccgactgctctggctccatcgccgccaccatgcacccaaagcgatccacccccgatgcatcccttttctctccctgtcagctgggcccatctcgcgtcaccgtagccaggtgccgccccgtcgccccgccccccgatctatatatgctgcccacgggctctcccacttctcccccacatgcacttgctgcagcagccgtaggacacacgcacaccgcctcgacctcgagtccaccactgactccaccacctccccctgttttttttcgacctcgctctgctcatccgcacggccagacagcc

SEQ ID NO: 1020 - RNA, 41 nt, Artificial Sequence
  artificial sequence
uaauuucuacucuuguagauuggacagagcuccaagugacc

SEQ ID NO: 1021 - DNA, 20 bp, Artificial Sequence
  artificial sequence
agcacggacgatcctttacg

SEQ ID NO: 1022 - DNA, 21 bp, Artificial Sequence
  artificial sequence
agctgcttcaatccgacaacc

SEQ ID NO: 1023 - DNA, 573 bp, Artificial Sequence
  artificial sequence
agcacggacgatcctttacgttgtttttaacaaactttgtcagaaaactagcatcattaacttcttaatgacgatttcacaacaaaaaaaggtaacctcgctactaacataacaaaatacttgttgcttattaattatatgttttttaatctttgatcaggggacaacagtggttgataacctgttgaacagtgaggatgtccactacatgctcggggccttgaggactcttggtctctctgtcgaagcggacaaagctgccaaaagagctgtagttgttggctgtggtggaaagttcccagttgaggattctaaagaggaagtgcagctcttcttggggaatgctggaactgcaatgcggccattgacagcagctgttactgctgctggtggaaatgcaacgtatgtttcctctctttctctctacaatacttgctggagttagtatgaaacccatgggtatgtctagtggcttatggtgtattggtttttgaacttcagttacgtgcttgatggagtaccaagaatgagggagagacccattggcgacttggttgtcggattgaagcagct

SEQ ID NO: 1024 - DNA, 5228 bp, Zea mays
cgttcgactctgaccctggccaggtcctggatggcctcgcggccttcaagtcagggttttgccggcgcgtcgtgtacgaggacgcgtgcgaggcctttgggactttgctcgagatgtacagggtggctaggacccagtacatgagggggatgctggcgttgcacggtgcaggtgcacacgtgagctgaggctgagccgtggagaattcgccgtgacagagaaaggttttgcttttctggtggtggttgggtggctaggctagtcttttctcctagcgaggaaaacctgacctgtgagtgatggacacttgtacgatcgtgccatgtatcgttcgatggctgcttttgactgctggtaagattttccaatggcatcgatctgtgacttgttccgttgttcgacaatcagttttcaattcagcagcactctggcttgcccctttccagctctggacggttcttgcgtctttcatgagcatttgccagtaaagaagtcgctggtcagtaaagaattgccagtagtggtactggcttgaagtcgccacttgtatattgtatacagaattgcagcaaaacaattggccgtctgcgtctccagcacctgcgcgctcgctcggactcgggcaccattacgccagcgaagtagacgacgtttcttggccgctaatatcgcctccaatcatttttgcattacaaaatggcggtcaattaatcctacgcagaacaaaggcaacgaggaggcggctgattgccgcgctcggcgttccaagcacaggaggtggctggccagtgtgcccaaggcgcgtcaaggctcccgggccccggcgaaggcgcgtcatgcctgccgcctttgcctgcctctgatgctcgcaaagggccagcattctctcgtccactcaacgacagcgagccctatcccctcagcaaaagccagatgcctgttgccgtcggccactggatgccaagtactttttatatacgccgtccgcgcccacaacccccgagacccgcctcccctcgtcgtctcgcctcgcgtcgtctgcgctcgcggctcgtcacaggtgaggtgagtgagtccggcgggagcgagcaagagcaatgctcggtgccgcactactctgtcagcattctctggcctcccgcgtgccggcgtgcgtggtttcggcctttcgggcgctgctggttgtggttgacgcgccggttgctttgctgaaggtctcggcgggagaggggcggcggccggtccgtgtccgtgtccgtcgacggttggttcgggaatggcgcaggcggtggtgccggcgatgcagtgccgggtcggagtgaaggcggcggcggggagggtgtggagcgccggcaggactaggaccggccgcggcggcgcctcgccggggttcaaggtcatggccgtcagcacgggcagcaccggggtggtgccgcgcctcgagcagctgctcaacatggacaccacgccctacaccgacaaggtcatcgccgagtacatctggtacgtgcctagtacgtagcgcagagaattgttccttttttttccttttcctcccgcacgcacgcacaccacctgaggaacagggagtactaggccaagacaacaaggccacagagaattgcgacttggttgcatagttcagtgagtgggatgccactaaaacttgtttaagtttttatttagtctaaaaggccatcacttctgaatctttgtgggtgctgattcgtctctgctttcaagttcttgctccccacttagatgacactgtgtgcaccaggtacttttatgagtaaactgaaatataccatggatgaaatatatatacacactatgatgaggatcacaacaacattgtgtagggtcggaggatctggaatcgacatcagaagcaaatcaagggtgaggattccacgtcaccaccaccaccgtcatctgcatctcatttattggacaattgggcagttccgaggtctttgggggaacgaatcaatgagcacagggcactcttttcctatctgcatgtcgcttttgcttgacggtattcaaaataaatcttaatgcctgcgtttttcagacgatttcgaaacccgtggaggatccctcagaactaccaaaatggaactacgatggatctagcacaggacaagccccgggagaagacagtgaagtcattctatagtaagatcgtgattacaatatactactattcatgtgtgttcttttttatatgcaagcattttactgttgcatttctgacgtttctctttctgtttccagcccccaggctatcttcaaggacccattccgaggtggcaacaacgttttggtacttcccatcgcaaccgagtcagcccttttgtgccattccacataagctcgaataaaaaggctgaaagaatagatgttactgccttctcaactagtcctttaggctttagctggaatatattatttgattctttatgattgtcgcatatcactgttggattgaatgccacattgtcacctgaatgtattggcaaacttgctgaattttaactagcatgtgcataacagcacgctggttgatacaatttttttgcttttcaggttatctgtgacacctacacgccacagggggaaccccttccaactaacaaacgccacagggctgcgcaaattttcagcgacccaaaggtcgctgaacaagtgccatggtaattgtaacttaatcgcatgcaccctagaaactatagtgcaaatctcactattattttctcattgccttcacaaaatgagttgaaggttgaaacacttgcctgtgtcatttttcttccaggtttggcatagagcaagagtacactttgctccagaaagatgtaaattggcctcttggttggcctgttggaggcttccctggtccccaggtattatattggataggagaaagaactgggtttaccatgccataatgatcttattttatgaaacacaatgtcttgtagtagtttaacgagcacgattttgaaaaggaaaaaaacatattgtatcaaaatatggcagggtccatactactgtgccgtaggagccgacaaatcatttggccgtgacatatcagatgctcactacaaggcatgcctctacgctggaatcaatattagtggaacaaacggggaggtcatgcctggtcaggtatgcttatgatatttctatatacatgtaatttgtattttctttttcgcaaccagagtgttatagctagcaccaccactccaccctcattttctcttcttgcaaaggaaaatatataattgtttatctggcagaacttcataaaccgtatctgtgcagtgggagtaccaagttggacctagtgttggtattgaagcaggagatcacatatggatttcgagatacattctcgaggtacctcagacaataattaaggatttacccatatcttttcgttttgtttttttatcttctccctaattattacagcatattttacaagtccagctgcttattatagtaaggcgtttatgattgcacacagcaacatatcatgattgaattaggcatttcagaataattttctcctggtaaaaatatatattccattttatctgtattgttcaaaatatctgaatccttaagcccatgatttcaccctttagttaatgccaaattttacacctccataaacacttataaataaatattaccctgctcacctttatcagagaatcacagagcaagctggggttgtccttacccttgatccaaaaccaattcaggtatgtccaccagcaagttgtttcaaatcattagtgtaatagaattgaagggatcttaacatattgaattggtgacagggtgactggaacggagctggctgccacacaaattacaggttacagtcttttatgctaataaagcttaatttcctatagcacttactacagtttagcacatgctgactgctgagtgttaaaaggaaaaaatttgtcctagtattctggaaagggagtagaagtgaagtatcagtgtatcattaataaattgctttctagtgtgagtggatctagatgagtgtccattcgcttcaatgctaactttcgttatttaattaatatttttcccaacacatttgacacactgggactgacacacagtctgaacccctcttgaatgtagcacaaagaccatgcgcgaagacggcgggtttgaagagatcaagagagcaatcctgaacctttctctgcgccatgatctgcatattagtgcatacggagaaggaaatgaaagaagattgactgggaaacatgagactgcgagcatcggaaccttctcatgggtatggatgaagcacctttcattattttccgcgagtccactgagtgttgtttgtctgtaagttgtaccaatgaaacatttccatttaccagggtgtggcaaaccgcggctgctctatccgtgtggggcgggataccgaggcaaaagggaaaggtacatgttcttgcagtgttccctaaaattgcttacagttggaagaactcagataatccctcattagtgcagggcgtcagtaattttctactttgcatcctgtgagatgattcttgacgtaactctctactgttaaagcaagtgctggactgccgcaaaattctagggaaaaagtcgaacctatttttgtgccagtttcatattttgtaatccattttttaagtatccgtggcctgtgaccacgacaaacactagaatgcaggggacgtttgtagtgaaagaagagcattcttcaacacatcctttctttcagatatttaaattttgacgtggccctttctcacccttgtcttctctgacaggttacctggaagaccgtcggccggcatcaaacatggacccgtacattgtgacggggctactggccgagaccacgatcctctggcagccatccctcgaggcggaggctcttgccgccaagaagctggcgctgaaggtgtgaagcagctgaaggatggttcaggcaccaatataaaccggtccgcgacaagattgatctttgtgtccatggcgtgggtcttgcgactctctgctcggcggtgccactctgtacaaaatcacggctgtctttgattcatcggatattcggatacgtttgtttgttactttttgcttggacacccaccatgtttggaacttttttgggctccgtttgggggctgaacgatggtcagtgg

SEQ ID NO: 1025 - protein, 423 aa, Zea mays
MAQAVVPAMQCRVGVKAAAGRVWSAGRTRTGRGGASPGFKVMAVSTGSTGVVPRLEQLLNMDTTPYTDKVIAEYIWVGGSGIDIRSKSRTISKPVEDPSELPKWNYDGSSTGQAPGEDSEVILYPQAIFKDPFRGGNNVLVICDTYTPQGEPLPTNKRHRAAQIFSDPKVAEQVPWFGIEQEYTLLQKDVNWPLGWPVGGFPGPQGPYYCAVGADKSFGRDISDAHYKACLYAGINISGTNGEVMPGQWEYQVGPSVGIEAGDHIWISRYILERITEQAGVVLTLDPKPIQGDWNGAGCHTNYSTKTMREDGGFEEIKRAILNLSLRHDLHISAYGEGNERRLTGKHETASIGTFSWGVANRGCSIRVGRDTEAKGKGYLEDRRPASNMDPYIVTGLLAETTILWQPSLEAEALAAKKLALKV

SEQ ID NO: 1026 - DNA, 13742 bp, Zea mays
atttttgtcgtgtcatcgccttcccttcacgcataagatgcgtatcactagaggatacatgccgtccacgtcacactcacgcgtgatttgtgcaataagatagaatgcgatgttgtatcctcctttcctcaatagtgccaactaagaggtgataagtttgggatcctcttattgctcttcctctaacctttttctaggatgcctcttcttttttggttctcgtgttcattgtgagagaggcgacatgttttgccaaatcaaaagggaccacaagtgaggaaacttcaatagtgtacataatgtatatagggtatagagggggaaagttgcgaaatgaagagaccttgaactttactcaaactaaaaaatatctaactatttgcatggatgcatacacatcaccttacacattgacactgagatttcattgacacgaagtagttatttcaagtatggttcatttgtacgagttcttgcaactagttgatagacaaagaattagttggatatataatattgaccggcaaataaatcgctaagcaagaacaccattcactaaattaattattaaaatcgtatgcagaatatgtcacagtaaatgtgttccgccggaaagatattcagacaaatgctatctatttagtatgatttgctaacacgtttccatttttgtacaccaaaaaagcaccatacaggcaaggggtacaacggaatcctgtttcttgtagggacccatacgaaatatggctgagatagcctcacctaacaacaacaaaactcttaaaataaccaaataaacagagaaaaccaaaaaaagggaaacaaaatttgtgagaagattgggggcgaaaatataatcagtggggccgtatgcgtgcgtggggacgccacgcgagacgaggagagcggggttggcagctaggcgcggtgagggcgagctcaccgccaccctccctcgctcctcccctctataaatgcagaggcgccgaatgctccccaacgccctgtacaatccgggggagaggtcaaggaaggcgagcgacgctcggcaggcagggcatcccgcgaggccgcgacagaggcggcactccgctcccaccaacccacaacaccgatcccctcctcgccgagccgccgccggggataagcgtggggaagtgagcagccaaaatctaagacaccgatccccgggcgtgagtcgcgaaggtagcggcggagaaaagggcggagccacaacgcggtcgtgagcccgcagccaccggttccgtgcggctagacggagagagaggtatccgctcgctgcaccctcttgccgtgacccgcgagacgctaaaaaaagccgacgggatttggcaacttggcggtttggttcggctgtagcgtgcgtgcgtggttggtggcatacgcggccgtctcgttgcttttatttatttcgatccgttgatgtttgattctgcgtccgtccgtgcgctgcttcgtgaatctgctgtgtcgcggcggcggcggaggaatccgcaccgccgtgcgtggggttggtagatctgttcatccctgcgtgtgtttccgccgctgaggcgttttcttcgtaattcttttcgggagtgctctgttacgctgcggagtgggtcgcacgctcttttctggatgcctatggtgttgacatgtgggcgtagggaagggccgaagcccgaaggggacagccttgagctttctgcttgttttttcgggtgctttttaaatatgttttttcacgcatttctggttcccttttcccccgcgtggtgttgtagatcgatgaacagctaagcgaacaccatctgatgttcgtcgttgtttgactgttgcatgacaggttgcgaggcttgctgttcagccatgtcgacggcgcaagggacagcgttgaggtcggcgccgctgggcgcaggtcgttgggcccgacgcggccgccccgtggcggcgccgtaccgttcgggctggcaagcctacggtggcgtttccctcgagggcagcggattccttggccgcgtgcaccgcaccgaggagcgcgtcgctccgcgggcgccccacgcggcggcacgcgacgccgaggtggtgaggccgctctcaaagctcccgaacagcagcattgggctctacgattcctcattcgagcgtgacgcttgcggcgttgggtttgtcgctgagctatctggcgattacaaacgcgagactgtgagttacatcgattccttcaaagttcaaagaggcgatgccacatgcattgtagctacactattttgatgtatcatgttcgggatgccgattttgctctcctttttaccccaggttaatgatgctattgagatgcttgagagaatggctcaccgtggtgcctgcggctgcgagaagaatacaggagatggtgccggcatcatggtcgctctaccacatgacttcttcaaagaggtgagtttctttgcaacaaaaaaaaatagaagaacagatttgttcttttcaacagttattcaattgtttttgtgttcttgtaggtcgcaaaggatgctgggtttgagctacccccaccaggcgagtatgctgttggaatgttttttatgccaacagatgaaaagcgtcgtgagaaaggcaaagctgagtttatgaaggttggtgtaacactgttaataaatttgatagcctatgatgcaggattttcatgttaagctcatttctctgattaataatcttgtccttgcaggttgcagaatcactgggacatgtaatactcgggtggcgtctggttccgactgacaactcagacttgggtgaatctgcactcgagactgagccagtcattgagcaggttttcgttaccaagagctcaagatcagaggctgagtttgagcaacaggtaattccataccactagatgtaagtgcatatcagcacatttgatggatttggctttaacattttttcatgaattgttgcagctatatatccttaggagactctcaatcatctctgttcgagcctctctgaacattaagcgtggtggagagagggatttctacatgtgctctctatcttctaggtgcttcccttttctcacttcaaaagtttttgttcatgctttgatttcattaggtttcagggctgaaaaggatcagagagtctccacttagcacaattttcagaatggaattttggcaatatttttgtttttctatagggggatagcaaaaaattgccttagatttgctcttaaaaattgtaaatatgtagccaaatgacattctggttggcttatgtttgtatgaataattcttattcaaagttgtatatctttatattacaggactattgtttacaagggccagcttaaaccgtcccagcttaaggggtactactatgcagacctaggtcatgaaaacttcatgagttatatggctctggtaaatacaaaactttggcacttacacaaaaattgtcatgatcatagtcgacggatgggaaccaataatagcaaggctgttgtaagaagatacactcctatgcaggcatcgaactttgaactgtcctaccatcactgctctactcatatgctatttcagtcctggttcttgatgccttaaagtgaagtattagaaatctctattagttgatacccgataaccatgttgcagagtccagctgcagttctgctatggccgactgctatgcccgactcatcaggatgtgacctccgattaggtggtgggaaggaaatgtgtttggtttgaggtagcttagggctcccaactgttttgcatgaaattctgtgcaactgacattttctttttggtagtgctagtgcttcattctgatgttctattcagcatcttaaagctgcaaactatggcagtaatatgatttctaaaatccatatattaaaacaggttcactcaaggttctccacaaacacctttcccagctgggaccgtgcacaaccaatgcgtgttttaggtcataatggagagatcaatactcttagaggaaacaagaattggtaatctcgctaaaccttgtgcatctgctgtaacaatagtttcatagtttggtgtggatacagtcatctccaccttcttatgctgtttggaatttatgggccttagaattgtctttaagtaatctggatttatgacaggatgacagcacgtgagggtctcttagaggctgagaagcttggattatcaaaggagcagctctcaagaattctgccaattgttgatgctacctcttccgattctggtatgaagcacaatgtttcagtgttgtatgatgcacagttacacctggcaaatgaaaattgcctatctatctttcagaaacttattacttggaaaaaatgttaaactgtaggcgcatttgataatgttcttgagcttcttgtccgaggtgggcgaagcctgccagaagctgtgatgatgatgatccctgaggcatggcagaatgatgtaaacatggatcctgagaagaaagctctctacgagtttctgtcagcacttatggagccttgggatggacctgctctaatatcgtgtaaatatattctattcactttccttgtctgaccattcttctgactggttacttgatctactcaatcctaacttgtctgtcacctacagttactgatggtcgttaccttggagctaccctggaccgtaatggtttgaggcctggtcggttttatgtgacgcacagtgggcgtgtgatcatgggtagtgaggtcggtgttgttgatgttcctcctgaagacgtgctgagaaaaggcaggctaaaccctggaatgatgttattggttgattttgagaatcacactgtagtggatgatgaagctctgaaagcacaatattctaaagctcacccgtatggagaatggctcaagagacaaaaaatatacctcaaggatattgtagaatcagtaccagaaaccgatagagtcgctccaagcatttctagctcactttcagtaagtcattaccatgcaccaacattactggtggtaacttggcaaaacataagtaatgtaacacttatgactcttataatttggtgcagcaaaagaatgagaacatagatcatgttggtatcagtgggattttgactcaactgaaggccttcgggtaagcaagagatttattctattctgctggcatttcaagttttgctgatggttaactgatgtactccaggtacacggtggaagccctcgagatgttgctactgccaatggctaaggatggagtggaagctcttggttccatgggaaacgatacaccacttgcggtgatgtcaaacagggagaagttgacttttgagtacttcaagcagatgtttgcacaagttacaaaccctccgattgaccctattagagagaaaattgttacatctatggagtgtatgattggcccagaaggtgacttgttggaaacaactgaaaaacaatgcaaccgccttgcacttaaaggtcccttggtttctattgatgaaatggaggctattaaaaagatgaattatcgaggttggcgaagcaaagtgcttgacataacttatccaaaaaagtctggaaggaagggcttggaagagactttgaacagaatttgtgctgaagctcgtaaagccatacgcgagggatacactattttggttctctcagatagaggttataatttatttatgctagtctattctctatttttattccacaccttatataccatatatgattataccaatcacccaatagtcaattaaacttccccacatatgagttaaatgcattgtacaaatttgttatagctcacagacatcttccagtatactatctgttgctattttcatttgcacaatgtaccataacttgtttgttccttttcatttagcttgagaatagctcctactttacacaattcaattcttatgacagtccatcaaagtttagcaccatggagatctcactttgtttgtttgctgaactttgttatgcaggattttcctcagaccgtgttgctgccagttctctcttagcagtgggagcagtgcatcagcaccttgttgcaaatcttgagaggacacgcataggattgttggttgagtcagctgaacctcgtgaagtgcaccatttctgcaccctggttggatttggcgctgatgctatatgcccttatttggctattgaagcaatttggtgcttacagaatgacgggaagattactcctaatggagatggacaaccttactcaaaggaagagctggtggcgaagtatttctatgcttctaactatggaatgatgaaagttcttgcaaagatgggaatatccacccttgcatcctacaaaggtgcacaaatttttgaagctcttggtctttcttctgaagtggttggcaagtgtttcgaaggcacacctagcagaattgagggtgcaacatttgaaatgcttgcacgagatgctctccgtcttcatgagttagctttcccatcaagagcccttccagctggcagtgcagatgcaaaggcacttcctaacccaggggattaccactggagaaaaaatggtgaaattcatctcaacgacccacttgcaatgggaaagttacaggaagcagctagagtcaacagccgggcagcatacaaggaatattcgaaacgaattcaggagctcaataaggcgtgcaatctacgtggcatgctgaaatttaaacatgtttctgacaagatatctttggatgaggttgaacctgcaagtgagatagtgaaacgcttttgtactggagcgatgagttatggttctatttcattagaagcacatactgcccttgctattgccatgaacaaacttggaggaaaatctaatacaggtatgtttctcatccatacgtggcatttctccgttataaatgtggaggaattattgttttttgggcatattagctccatgaaaaaccatctgaaatatgtaatatgtatggaccaatttgtagtttttgtaagagtgatgtgctattcttttcctgaaacatgaatcacatcagcctgtcctctgtagtctgtactcaacattttagacacaatcacgtttaaaactatagtaaagtgtttgctatcaaattaaactaaattattcattgcacatctcctctttctaggtaaacctatcccctctggtaacccatcttcttgtttatgttgaatactagcttttgaaaacatatcatactgatttgctgttataatttattgcagggtaagttttttcttttatataatacgatagtgcataactgatgaggacaactgctataaatctggggtttaatagaagtacttgaatagttatttttcatcctgcagcctgctgcatgcaatgttccttttcgattataaacccctttaatttgtgtcttagttcaggaacatgagtattattctttttttacgacaacagcatggggaggctagttctagatcttaatattaaatacacttattcccaaatgcgctcgcttttatatatctgtgaaggtgagggaggggaacagccctctcggatggaaccacttcctgatggctcaatgaatccaagacgaagtgcaatcaagcaagttgccagtggacggtttggagtttccagctattacctgactaatgcagatgagctgcagataaaaatggctcaggtactatgcactatgcagccattaaaatgaattacatcctgttgaaagaacatgggtcttccatatttcattttggatttactgtatttttcaccttaaatttctatagggtgccaagcctggtgaaggtggtgaacttccaggccacaaggttattggtgacattgctgtcacaagacactccacagctggtgtaggactgatcagtccacctccgcatcatgatatttattcgattgaggatcttgcgcagcttatacatgaccttaaggtataaattgtaaatagagtaatgctgttttctgtacccacaagatccatggctcgctgattgttgctgctgtctcaatttaattttttacactccttatcaacctccgaagtcctcttattggtcttaatataatactccctccgttgatccgttcttttttatttgtcgcgttttagttcaaaaatgaactagcgggcgacaaatattcgagaacggagatagtaatattcatggatcacctgctgtgatgtcaactcttgctaccttttactgctgaacttgcatgtatgtttatgaatctccaacttctaaatgctgttcagtgacagtgatattcttgcctgtgcagaattcaaatcctggagcccgcatcagtgtcaaactagtttctgaggctggtgtgggagttgttgctagtggtgttgtaaaaggacatgcagaccatgttcttatatctggccatgatggtggcactggagcttcaagatggaccggtatcaagaatgctggacttccatgggaacttgggttggctgagacacatcaaactctagtagcaaatgggcttcgtggtcgagctgtcctgcaaacagatggacagttgaagactggtagagatgttgctgttgcttgcttgcttggggcagaggaatttggtttcagcactgccccactgattacacttggctgtattatgatgcgaaaatgccacatgaacacttgtcctgttggtatagctactcaagacccagtgcttcgagaaaagtttgctggagaaccagagcatgtcatcaactttttcttcatgcttgctgaggagctaagagaaatcatggcaaaccttgggttccgcaccattactgaaatggttggacgttctgatatgcttgaggttgatccagaagtagtgaagagtaatgagaaacttgagaacattgatctctcactaatcttgaaaccagcttcagagattcgtccaggtgttgctcagtactgtgttgagaagcaagaccatggcctagacatggcattagataacaaactaatagatctgtcaagaactgctattgaaaagcaagttcgtgttttcattgagactccaatccagaacacgaatcgagcagttggaactatgctcagtcatcaagtcacaaaacgttatcacatgaatggattgcctgctggtacaattcatgtgaagtttactggaagtgctggtcaaagttttggcgcttttctttgtcctggaatcactcttgaactggaaggagacagcaatgattatgttggtaaaggattatctggtggaaaaattgttgtgtacccaccaaggaacagttcttttagtccagaggacaatattgtcattggtaatgtggctctgtatggtgctaccatgggagaggcatatttcaatggtatggcagcagaaagattttgtgttcgcaactcaggtgctcaagcagtggttgaaggaattggagatcacgggtgtgagtacatgactggaggcactgttgttatcctcggaaaaacagggcggaactttgctgctggcatgagtggaggcattgcctatgtttatgatgttgatgggaaattcagtgctcgctgcaacaatgagttagttgatctatatcatgtggaggaagaggatgacatcatcacattgaaaatgatgattgagcaacatcgtcgcaacactgagagtgttttggctagagatatactctccgattttgataaccttcttccaaaatttgtaaaagtatatccaagggactataagagggttctagaaagcatgaaggtggaaaaggctgttgctaagcatgcaaaggagcctaagatggcaaatggaatttctgtgacaactaaggtgaggcacattttcaagtggcaactttgtttcacttttcatcacgaattcttacttagctattgtaaactattaattcatcatacctaaacatttctagtttagttatgatttcgtattcatttaatagagaactagttgcacaaacttttatccatcagaaacagctaataatataatttcagttcttggaagctttcattgactacttgtatcaactttcatgtacagaaagtacaacctgatcagtcagcaagccgaccaacacatgttgccaatgccaaaaagtacaggggctttattacatatgagcgagagagtatttcatacagagatccaaaagagcgtgttagagattggaaggaagttgcaatcgaatctacacctggtccactattaaatacacaatctgctcgttgcatggactgtggcactcctttctgtcatcaggtgatatttctattttttctgtttattatcatatttattcaaattaaattatctttttccatcatggttaagaagggcgggcctggtgcagcggtagagcctaccgtctgtaaccggaaggtcccgggttcgagcctcagcctctgcatattatgtgggtaaggcttgacgtttaaagataccattccctagaccccgcacagtgcgggaagcctaagatggatacattttcttgatgctaaattgaagttgttgtttccctacagtacttctttgaactgtgatgcaacttgtttgttccttttcttatctgctgatgataagattttggaactcttttttcaacatttttgttttactttcacaggaaagctcaggtgctggttgtcctcttggaaataagatcccagaattcaatgaattagttcaccagaacagatggcgcgaagcattggatcgactacttgagacaaacaacttccctgaattcactggacgagtttgccctgctccttgtgaggggtcatgtgttcttgggattattgagaatccggtgtctatcaaaagtatagaatgtgcaatcatagacaaaggttttgaagagggatggatgattccacgacctccacttcaaagaacagggtatgtactttaaagtttttaaactattcatttatttttatccgtgtttgcattttaatttcattactaggtagtacctcggttatgctcattaacaatgaaatgatcttattacagaaggaaggtggccattgttggcagtggaccatctggtttggctgctgcagatcaactaaataaaatgggccacttcgtaactgtgttcgaacgtgcagatcgaattggaggtttaatgatgtatggtgtgccaaacatgaagacagacaagattggcgttgtccagcgccgtgttaatttaatggctgaagagggtgtcacatttgtggtgaatgccaatgttggtagtgatcctttgtactcgattgaacgtctacgttctgaaaatgatgcggttattttggcttgtggagcaacaaaaccgaggtaacagactaaaggcaccagataaattttggttgatactacctgtgtatttgtttgttaagacacagatggtatatcatttgtaactacaaaagacacgatttaacatatacttcaaatagttgtgctgtattttgacctatggggatgtctttaacagagatctcaccatccctggacgcgagctatctggagttcattttgcaatggaatttctccatgcaaatacgaaaagtttactcgacagcaacctggaggatggtaaatatatctccgcccgtgggaaaaaggtggtggttattggtggaggtgatacaggcacagattgcattggcacatctattaggcatggttgcaccagccttgtaaatcttgaactcctgtcaaaaccaccaagcactagagctgctgacaacccatggccccaggtatgtgtctccctttgcagttatcacactttttagagtactgcatttatccttatttccagcttggccttttgcttttagtggccaagaattttccgtgttgactatgggcatcaagaagctgctaccaagtttgggaaggatccaagaacttacggagtcttgacaaagcgttttattggcgatggaaatggcaaggtgaaggcccttgaggtagtgcgtgtgaagtgggagaaagtagatggaagatttcaactcaaggagatggaaggatcagaagagattattgaggctgatctcgtcctcctagctatgggattcttgggtcctgaagcggttagtacccctcaaggctattctagttcctaagtacccttgttctagtgcctaaagtagtagagtccgtcttttcttccctgcagacaatagctgagaaattgggtttggagaaggacaacagatcaaacttcaaagcgcagtttggagacttcgctaccagtgtcgatggtgtgtttgccgccggggactgcagacgtggacaatcactggtggtttgggccatcacggaggggcggcaggctgctgcagcggtagacaagtacttgtcaaggtatgatcagaatgctgctgctacaggcgacagcactccctccgggacagggctcgttcagccggttgcggcatagtagcataaactggagcaagttttacgtttgtcagtgtatcctgtggttccacacagcaaacaccgttcttgtagttgtctaaaagaaacagagaaatccgggctcattaaggaatgaaagcccttctatattttttttgacgatagataaacagttgaaagttttggtggctattgtctcttttttctgctgcatgtggttttgtagtccaaacaatgtacagtttcccctttcttaaatagatgtaaatttgtcgtgtgatatgtcggttattttctatgtgtttgcaagcgcgactgagccaccagtctgtatgaggccgagtctcggtttcggtcgacttataccgttatacgaatacgttatactaggtgtgttagattttggatagttgggcggcctgttaatcgtgctgtcacatccggttttaaagaataaagtcgggtgcatctcatacatgcatcaaagaagataacatatataataatagattgtatagagataaatgtgacaataatcaaagtatttattacatagtggaagtcttacaaaaaatatatatataataggatctaaaatacattcttagcgccagaaagtcaactgagacacgccacctagatcgaatcgaactcctcattaagcggctcctcttaaaacacttgtacttctcctgtgtgggtgtgagacagcaaaggtgagctcacacatgttcatcgctcaacaagttgtggggaataatgtggatgaactcaccaaaggtgtgagttcatgtaaagtgtaagactagtcaacaacaagggttaaagctgagcattgtttttaatcagttggtcaaaattttattagcagttactaaatgtaagtaaatatcaaactataataaacataatagaacaaaattaataatgtcggtgaccataattagggtacccccaagactcctaatctcagctggtaaccccatcagcacaaagctgcaaaggcctgatggacgcaattccggtcaaggctctgtccactcaagggacacgacctcgcctcacccgagcccagcctcgagcaaagactgccgactcaggaggattcacgtcttgcccgagggtcccctcaagcaacaggcacaccttcgactcgcccgaggcccggctcgggcaggcttcacggagaagcaaccttggccggatcgccacgccaaccgactgtatcgcaggagcattcaatgcaaggatcgcctgacaccttatcttgacgcacgctcc

SEQ ID NO: 1027 - protein, 2165 aa, Zea mays
MSTAQGTALRSAPLGAGRWARRGRPVAAPYRSGWQAYGGVSLEGSGFLGRVHRTEERVAPRAPHAAARDAEVVRPLSKLPNSSIGLYDSSFERDACGVGFVAELSGDYKRETVNDAIEMLERMAHRGACGCEKNTGDGAGIMVALPHDFFKEVAKDAGFELPPPGEYAVGMFFMPTDEKRREKGKAEFMKVAESLGHVILGWRLVPTDNSDLGESALETEPVIEQVFVTKSSRSEAEFEQQLYILRRLSIISVRASLNIKRGGERDFYMCSLSSRTIVYKGQLKPSQLKGYYYADLGHENFMSYMALVHSRFSTNTFPSWDRAQPMRVLGHNGEINTLRGNKNWMTAREGLLEAEKLGLSKEQLSRILPIVDATSSDSGAFDNVLELLVRGGRSLPEAVMMMIPEAWQNDVNMDPEKKALYEFLSALMEPWDGPALISFTDGRYLGATLDRNGLRPGRFYVTHSGRVIMGSEVGVVDVPPEDVLRKGRLNPGMMLLVDFENHTVVDDEALKAQYSKAHPYGEWLKRQKIYLKDIVESVPETDRVAPSISSSLSQKNENIDHVGISGILTQLKAFGYTVEALEMLLLPMAKDGVEALGSMGNDTPLAVMSNREKLTFEYFKQMFAQVTNPPIDPIREKIVTSMECMIGPEGDLLETTEKQCNRLALKGPLVSIDEMEAIKKMNYRGWRSKVLDITYPKKSGRKGLEETLNRICAEARKAIREGYTILVLSDRGFSSDRVAASSLLAVGAVHQHLVANLERTRIGLLVESAEPREVHHFCTLVGFGADAICPYLAIEAIWCLQNDGKITPNGDGQPYSKEELVAKYFYASNYGMMKVLAKMGISTLASYKGAQIFEALGLSSEVVGKCFEGTPSRIEGATFEMLARDALRLHELAFPSRALPAGSADAKALPNPGDYHWRKNGEIHLNDPLAMGKLQEAARVNSRAAYKEYSKRIQELNKACNLRGMLKFKHVSDKISLDEVEPASEIVKRFCTGAMSYGSISLEAHTALAIAMNKLGGKSNTGEGGEQPSRMEPLPDGSMNPRRSAIKQVASGRFGVSSYYLTNADELQIKMAQGAKPGEGGELPGHKVIGDIAVTRHSTAGVGLISPPPHHDIYSIEDLAQLIHDLKNSNPGARISVKLVSEAGVGVVASGVVKGHADHVLISGHDGGTGASRWTGIKNAGLPWELGLAETHQTLVANGLRGRAVLQTDGQLKTGRDVAVACLLGAEEFGFSTAPLITLGCIMMRKCHMNTCPVGIATQDPVLREKFAGEPEHVINFFFMLAEELREIMANLGFRTITEMVGRSDMLEVDPEVVKSNEKLENIDLSLILKPASEIRPGVAQYCVEKQDHGLDMALDNKLIDLSRTAIEKQVRVFIETPIQNTNRAVGTMLSHQVTKRYHMNGLPAGTIHVKFTGSAGQSFGAFLCPGITLELEGDSNDYVGKGLSGGKIVVYPPRNSSFSPEDNIVIGNVALYGATMGEAYFNGMAAERFCVRNSGAQAVVEGIGDHGCEYMTGGTVVILGKTGRNFAAGMSGGIAYVYDVDGKFSARCNNELVDLYHVEEEDDIITLKMMIEQHRRNTESVLARDILSDFDNLLPKFVKVYPRDYKRVLESMKVEKAVAKHAKEPKMANGISVTTKKVQPDQSASRPTHVANAKKYRGFITYERESISYRDPKERVRDWKEVAIESTPGPLLNTQSARCMDCGTPFCHQESSGAGCPLGNKIPEFNELVHQNRWREALDRLLETNNFPEFTGRVCPAPCEGSCVLGIIENPVSIKSIECAIIDKGFEEGWMIPRPPLQRTGRKVAIVGSGPSGLAAADQLNKMGHFVTVFERADRIGGLMMYGVPNMKTDKIGVVQRRVNLMAEEGVTFVVNANVGSDPLYSIERLRSENDAVILACGATKPRDLTIPGRELSGVHFAMEFLHANTKSLLDSNLEDGKYISARGKKVVVIGGGDTGTDCIGTSIRHGCTSLVNLELLSKPPSTRAADNPWPQWPRIFRVDYGHQEAATKFGKDPRTYGVLTKRFIGDGNGKVKALEVVRVKWEKVDGRFQLKEMEGSEEIIEADLVLLAMGFLGPEATIAEKLGLEKDNRSNFKAQFGDFATSVDGVFAAGDCRRGQSLVVWAITEGRQAAAAVDKYLSRYDQNAAATGDSTPSGTGLVQPVAA

SEQ ID NO: 1028 - DNA, 7166 bp, Zea mays
ttgtagttgtgttcaaatatggaactggtttgaccttctggtctgatccaatccttggacttcttctgttcctgcttgatgcatgttcaactcgaattttagactttttaggatttgaaaacaattttgctatgtgttcatcttcagttttgagtgatcagtaatgctgaagattcaaaaaatataaaatttcttcttttcttgagtaaacctacatactataaacttgtactgatatgtttttatcattggaatagcctggtttgccgctcttgcaacaatatctgtctcggtttgagaaattagttatggagctcatgccaaaattgggagaacactttgttgaataaatgataaaccgaagcatgtatggaagccggtggtttatcacagttttctcatgttccttcccatttcatctaactcttagaattttggaagcaagatatttggatgctctgctttttctgtagctgatcctacatcttgtatagtctaacatttcgttctttcttggaccatccgtttatttaactgaggataggagtggatagagacttctcggattacaatatgtttgaataactattccattaaaaaggtctacttgtgatatataaaaattgtagcaacacacaattatctaactatatttatattttttgaggtatgtaaacatccccttttagtgatgctaataaaaagtgtcgaataacaattagtgtttttgtatatcaatatattttattatagtgctttcttatcttaatgtatcttagcattacatgttgaccccgtagcaacgcacgggcatacacctagtatatatataaaaaagtgccaaacttgcaatcctccatcttctaaaataaagaacatagcacgaggaaattggcaagcaagtccatcttcagcgtccatctgagacattttttattgcaaaaaccagagagtgacttttttttgttttcaaaaccgcggctgtggtcggcggccccccggtctccttccactcgctttccggcgggcgactggcctaaaatcgcctcttgtttgtttgcttccgtcgtcccctctccacgtagagcacgcccccggaccaccttttataagcaccaaccatctggccttgccgcgccgattcgccacgaagccgcactgtgagagagggacgcggcctgttgtcccggcttttagacgcaacttccatcgctgcgaagctatccattcgtgttcgtcatggccgccagcgtcaccgtggaaaacctcaaccccaaggtgagatcgccgcccgttttctcccccttgtctagctttctggtccttgaaggtcccattttttatggatttttcggtgggaagtttgggttttaacgagatggaggaggctctgtggatcttctgcgtccctctgcgtgtccctgattcagcttagccgcgggttggactctcgtgtgattgagaaatttggggtgaaaagattatccttgatttggttgagcggtacaagtcgtgcttagttcttgttcttgatgatctgattttgatttatacttataaatcaaacgataaaatttttaggataattgtaaccactgcaccggcgcaaagttacatcgtttatatgcttgcaataagtgcagttccttatacccagatcactagtcgctaactcgctatcgctatctctcaaccaagagttagatctcagcgcgactgcgattcgagctgctatagtgccttttctttttgttttgttttgtcgtgagtcgtgaccgaatagtttaagtcatctgtcagtatccttttccccctttgactcaaaaggggatatggcgatttgtttggactgctgccccacttctgttgcacaatatatataggttgatgctgtattgtttctgtgagatctgactatctgaggtactactttgttggcaatctgtgctttgttactaaacctattttgtaaacctgctgaatgtcgtgtgatcatgatttccatctgtttcaaagacaacagctttcgtgctttgcttctctgggtaaggcgagtgtggcttctcatgcctagctaatacactaataactattacaggtcttaaaatgtgagtatgcagtccgtggggagattgtcatccatgctcaggtatcttgactactgatgttcaacaaggcttgcagtctagtacttcagtatgttatatatcactgtgttcatgttcccaaagaatcgtttattcaccttatcacaaggcaatacagttaaatcaggcaatgttcttatagagttttgttagactgttgtagtaatagtatttgcttttgacactgctatctgacaaagaacagcatagtgcagtacctgaatttacaaacatgtatttgtgttagagcttactttatagctttcgaagtctattttggtacaggaaagtaattaagcatgtagtctacttgattgctaataaccatattgctttattagtaatttaatttgcaattgttccctgatgaaattcttcctaattattgaaggtcaataatctttttcaccatatattatatgtctcattgtgaatgcttttaattaagaatcttgtgcgctccatgccattggcagatctgccattaaggatctgcttcgaaattgatttaatgtagccccattgttttttctgttaacagcgcctgcagcaacaactacaaacacaaccagggtctcttccttttgatgaggtacctaactgttgatttaaaagttcattgaaagtgcctttatctttcctttttttttcaaaaattatatagtccgttccaattatatttgtacccttgcagatcctctattgcaacattgggaatccccaatctcttggtcagcaacctgtgacattcttcagggaggtatgtgtttattttaccttcagattccacctttgtttcttctatatttacatggtaccttgcaggttcttgctctttgtgatcatccgtgcctcttggaaaaagaggaaaccaaatcattgttcaggtgaatatcgtcatcattcaatttacagaactcctaaattcagagatctagtgcgtgatatcctgctatttttcccaacttcagtgtcaaagcaacctaaaaattctaaaaaatacagagatagggcaatctgtcttcctttaaaatcaaagctgtggcattttctttgaaattagtaaacatttatataaatagtaaaatttcctggagatctgtcaggtatttaactttttcccttcaacttccacagtaattaaacatacctaggaagatagttttagagttctcatgtttaattgatctgttcatcagaagaaccattacatcattgcctaattatgcatgccctttaatttttcctaaaatttcccttgataccatttcaagttgcaaagatgattttttttcttcgtactgtttaatatttttgttagccataaactttcaaaagtagttcagtgtcccatttatacataaattcttatgtgtacttgatgggtcgtctcactgcagtgctgatgcaatttctcgagcaaagcagattcttgcaactattcctggaagggcaacaggtgcatatagtcacagtcaggttggcatctcactctgatatatttattgaccacaatgagagaggagtcttggcttcatttgattttttaatgtttcctagggtatcaaaggactgcgtgatgcaattgctgctggaatcatgtcacgtgatggattccctgcaaatgcagatgacattttcattacagacggagcaagtcctggggtgtgcatttttaacttctctttcaattgtcctggacattttctgaataaacatgatatcactgaagtctcatcttgaccttattcttccttcttaaggtccacatgatgatgcaattactgattaggaatgagaaagatggcattctgtgcccaattcctcagtaccctttgtactcagcctccatagctcttcatggtggagctcttgtatgtactttcatttgctcagcagaagaatatggtctatagtactaaatattgtatcaatgacacctaaaatcgagcgcatgttctttcaggtcccctattaccttaatgaaaaaactgggtggggtttggagatctctgatcttaagatgcaactggaaaatgctcggtcaaaaggcattgatgttagggccttggtggttatcaatccaggaaatccgactgggcaggtttgtaccaatcatttctcctctctcgttaaagaacatctctgcttgcttagatattctatttcctatgcacaacatactctttataattgagtgtaattacatgaagtgtgtatttcttgtactcccgtttttaagttagtgaatactttgtatacttattttgtttagggaaaactttttgagtagaaaaaatgtggtttttatcattctgacttctgaaatctgaatgaatgctttttcaaggctggtgaccaaaacacaaattttattgaagtggttcatttatttgtaggttcttgctgaagacaaccaatatgatatagtgaaattctgcaaaaatgagggccttgttcttctagctgatgaggtgagtgataggcaagtagctgatgttagacgtcagaacaacacaaaaaatttgccacgcctctaacactaatgccattttcattgttaggtatatcaagagaacatctatgtggacaacaagaaatttaactctttcaagaagattgtaagatccatggggtatggcgaggatgatctccctctagtatcgttacagtctgtttccaaaggtaaatttatataaccagctactttatctgccttttggccaagtaactggcttatccaaaacattttgttgctgcaaccaggatactatggagagtgtggtaaaagaggagggtacatggagattactggcttcagtgctccagtaagagagcagatctacaagatagcttcagtgaacctatgctccaatatcactggtcaaatccttgcgagcctcgtcatgaatccaccaaaggtctgccatatggaattctttaaattacgccctggttggaattaggaaatgccaaatcgtccagttaaaaatcattgctttattctccaggttggagacgaatcatatgcttcctacaaggcagagaaagatggaatccttgagtctttagctcgtcgtgcaaaggttagcctggttgcatttccactacactcgagtgtcttctttaaaaatattcaagatttttcttttgttcgttttacaggcgttggaggatgcattcaacaagcttgagggattttcatgtaacaaggccgaaggagcaatgtatcttttccctcagattcttctgccacagaaggcaatcgaggctgctaaagctgctaagaaagcgcctgacgctttctacgctctccgtctccttgaatcgactggaatcgtcgtggtccctggatctggatttggtcaagtgagtcaactcaacctttacatactgtaatgtacttgtgcgcctggcctgtttggttcgtggcgcatcggatagtgggttcttggcgatgcatttttcatgtaaatcagtcacagctacttcatttcatgttaacccggtcgtaacgatcgacggtccgctcctttgctggtacttcgcaggttcctggaacatggcacatcagatgcacgatcctgccgcaggaagacaagatccccgcggtgatcagccgcttcagggctttccatgaggcgttcttggccgaataccgcgactaaactgttacgctgtgtgtgagttaagttggaggttcagtagaactgtagaagagctcagtgacagcgcagaaagaggcagtgttagaaaggcttaggtccttcttcacaggagcaacagttgtcttgtctcatcaaggagaaataaaaattttagttttacaacttctcattgacactgttgggttcttgacatggtagagaattgtgtgcactgtgcctggcactgggtcctactagcggcgcaatttaagcgtgaccaggatggcgccatcagccatctctgtcgatattacactgctagctgaaaatgccacttggtccctttcaggtgtttgtggacctaaacctaagttgtcttccttcaggaacttgtggactgaaagcaatagatgcgacctgaatgacggttctttgtggatctaaaagcaagaccaagagactagttatctgactctcaaaattagctctctcattagttaaatttagctagtcatctgactagtaaaactagataaatagtctgttagagtaagatgctatatatagagagtgtaatatttttgaaaagataaatataaagttaaacaaagagccaaacataaatagtctattggagatgctataaggctaatcacaatggagattttatgaggtgtttcatatattaactattggagatgctataaggctaatcacaatggagattttatgaggtgtttcatatattaattagcctgccacattagttattttgatgacatgtcacatcatttaagaaaggaagagttttatgaggttttatggggataaaatcatgttaacttgtttccaaggtcttagaaactgtgtgaaacctctactgagagcgttttgtttcatattcatataattaagtaaatcttactggttatttatatgcagcatttaaaaagtttgttaacatatgaaatagtgagatgaaactctttattgagatgttgtttcatttattcataaagctgatgtgacatttttagaaatagggacataaaattctcactgtgattagcctaagcaagccaaactcaactcgccacacgatccgatttacgatacgacacagtttggtggggtagtagtaattcttcctacgctttaaacgcccaccgttcgcctggattccggggattctccaattcctgcatgcatctccatcgtgctgtggctgcattttttctacgcttcccaccaaccgcactgtcgggcagtgcaacagccaagagtgctgaacctaaaccgaactgactgcggcgtcctcttcttgttcccaaacctcaccgcctcaactgcttcgccttcgactgcgggcggc

SEQ ID NO: 1029 - protein, 482 aa, Zea mays
MAASVTVENLNPKVLKCEYAVRGEIVIHAQRLQQQLQTQPGSLPFDEILYCNIGNPQSLGQQPVTFFREVLALCDHPCLLEKEETKSLFSADAISRAKQILATIPGRATGAYSHSQGIKGLRDAIAAGIMSRDGFPANADDIFITDGASPGVHMMMQLLIRNEKDGILCPIPQYPLYSASIALHGGALVPYYLNEKTGWGLEISDLKMQLENARSKGIDVRALVVINPGNPTGQVLAEDNQYDIVKFCKNEGLVLLADEVYQENIYVDNKKFNSFKKIVRSMGYGEDDLPLVSLQSVSKGYYGECGKRGGYMEITGFSAPVREQIYKIASVNLCSNITGQILASLVMNPPKVGDESYASYKAEKDGILESLARRAKALEDAFNKLEGFSCNKAEGAMYLFPQILLPQKAIEAAKAAKKAPDAFYALRLLESTGIVVVPGSGFGQVPGTWHIRCTILPQEDKIPAVISRFRAFHEAFLAEYRD

SEQ ID NO: 1030 - DNA, 36 bp, Artificial
  synthetic
gtaagcgcttacgtaagcgcttacgtaagcgcttac

SEQ ID NO: 1031 - DNA, 5062 bp, Zea mays
agaggtcgcgggttcgaatccctttggagcctatttttttaatttaattttagctaggcgtgggatgcacgtgggaatgagaataggctttgtgggagggaaaatgagaaagatacgtgatagccggaaatggaaatgtgaatgggctttgccgggaggcactgatgcaccggttccgtctccaagtcctgaacaggctcgcccatactccgatccctgccctgtagctctcaacatgcatgctgctgaggcatatatacatatgtttaattgcaccgaaacactccacgtgccccgtctaccccagcaaagtgaacggagatcccgtgccccagactttgcaacaccgcccaagaaagataataaaagaagcccccggccgggcagattaattaagccacggaaatgtcaaaccatgcataaataaaaataaaagtagttagtactacgtgtgtgtgacgcgagaggagcagctttcagaagctttgtagccacacacgccgcgcgtacctttctttatcagtggcagtggcagtggaggcagtgtcctcggcgagtgctatcgtcgtcatccatcgtcggtcgttgcgaccgccggcgccgacccctagcctacacgcacgggctgcagttgctttgcgcaggctgtcaaggtgcgcagcagggaaggaagaaagaagccatccaatcatttagatctcgctgtgcaagtactagtactacggagcagtactagtaacaagcttgtggttgtgggatcagccaactgcgcaacgaaaaataattgccactgtatgcccaactccactcctagctaggagaggaagaagagtacaaggaagagactgtggcaagcacagcacagtggacctgtggatacacacctagcttggccggtacagagcaccgtgcttgcttgtccatttccgtcacagctagcgcttgcccaggtcccccaccttatcaacaacaactgtgcccctcctgcccccgctcgccgcgagagctcccgtcccgacgaccttccctcctgtagcactctacagtctacaccaagcagcagcgtctcctgttgcatgttgcactgcacctatctacgacgtccgttcccagtgctttgctcatccaccttcatcaagccaagcgtgtgtcctctgtcctctcccagctgcgagctccgacccccgccaccatgtgagcggttccttctcattcaagctcaaccttgtctccgggttcttgcttgctaacagcgctgcctagcaggtccgacagcagcgacttcaccgagctgctatgggagaacggccaggcggtggtgcacgcgcggacgaggaaacacccgccccagcaggccgccttcccgcccttcaccttcacctgcagcagcagagctcaagcacaacaaaggcagcagccggtgccgccgctgcccaagacgggaggaggcggcctctttgccgacttctcctcggccgccgccggcctagacgcccctcgtgacaacgccgacctcgacgacaccgtgccgtggatccactaccccatccccatcgtcgacgaagccagtcccgccgcgcctgccctggcagatagcttcagcccagatttcttctcggagctgcatgcggcggcggcgacgacgagcctcggccctctgccaccaccaccaccaccagtccagcacaccggcggcgacgacaacgacaaccggagcaccccggttcccaatcccaccaccggcagaggaccagagccctcaaaggaaacccaccgcgcaccagtactaccaggtccagccggcaggcctgagccaccacaaggcccacaagctgaggtcgcgcccgccaggaagcctcggccggagagcggcgccggggaggctttgatgaacttctccatcttctctaggcctgcagccatggcgcgtgccagcctgcggcagaggccgccacacacaggcaccgacaaggcgtccaataataatgccaccacgagcacccgcgtggagtcgacggtgctacagtcggccagtgccagtggcccgagaactgcagctgcccccgccgtgttcgtggaccagaggacggcgtggccgtcgcagcagcccaaggacgtgcggtttcgatgcgcagcagcagcgccaccgccgccgccgacgccgacggctggtaacctgcagcaagaaagacctagcaacaacaacaacatgactcctccgcagaaagaagtagagaccaggaaggcttcagaggctgcgggcgccaccgccacctcatcggtctgctccggcaatggtgctgggacaggaaaggacgacgagtcctggcgccaacagaagaggaagaccctgcaggccgagtgttccgcgagtcaagatgatgtaagcagaggatgtgaagatatcgcacaccttggacactggagtatctaacactggttctcttctcttcaggatcctgacgatgagtccggtgggatgagaagatcgtgcagcagaggtgcgaagcgcagccgcaccgcggaggtgcacaacctgtccgaaagggtaagtcccatgccaatatgccatgcgatccatctcgagctggagcctggagctgtgcacttgaactcaccgcactgtaatgcatgcaatgcaacaatgcaacaacaaacctgcagaggagaagggacaggatcaatgaaaaaatgcgtgccctgcaagagctcatccccaactgcaacaaggtatgaaatgtagatggtagatggaactggtagcaataaacagatgcatcgtctcatcatctctcattgcgcgcagattgacaaggcctccatgctggacgaagcgatcgagtacctcaaaaccctccagcttcaagttcaggtacactgactaaaacccgcctaaaactcgaaatgtagcatgcttcttcttcctcttccatatagatgcgctgacaagatggtggttatctttgagttgacacacgcacagatgatgtccatgggaagtgggctgtgcattcctcccatgctgctgccaccagccatgcagcacctgcagattcctccggctgctgctcacttccctcatctcggcatgggattgggttacgggatgggtgtcctcgatatgaacagcgcggcggcggcggcggcggcggttccatttccgcacatgcccggtgctcacttcccttgcccgatgatcccaggcgcgccactaccacggggtctcggaatcggaatgcctggcagaaacacgatgccggtgttcggagtccctccagggcaaccaatccagccaccattcccatctttggcgggccttcctgtcaggccaaacctggcacctcctcacgcctcctcagccgccatggataacatggtgcaggagcaacagcagcagcagcagcatcagaggctgaataatggagctcgactgggagcaagtacaggaggagatcctcagttgcagactatcgtgcaggtagcgtttcacagatagtgtatataaaaataggtaaaaaagaatcttcgccagttcttgtctggatctcttatatccaaatttcacaatggttgcaggctgagagacagcattttagtgtgccctcttcagcccaaaccgagagcgatcagtttttggatggtggtggcaacagggctatttgtacaggaagaaatgaggctgaaacatgaaaaacagtcagcaggtgagtctctgtgtgtgtgtgtgacctgactcaatgcaaaacttgacacaaatcattgaatttggcacaaaatattcgtatcctaatagagaacatggctgatgatttttcaggtctcgactaacagcaggctgcagatgtgaatatcagcgtcaactcatcctggaaaagagcctaacgagtttcaagatccacgaagcagatctgtcacttgataagactccaatgaatcaagacagggccatgacaggacgtctagctttagcgagcaaagatgctcctaagttttgtgtgaaatgtagatggtagatggaacctggttacaagaaacatttcttggcagccggtgctttttttttggcttcactgaagttttcttggatcagtatatcttatttcctcaggcattcagtgatcatatgcacaaagatatctgtccccatataccggctctgctttaactatatctctttgcaaataataacgagctaacaattgttcagagctgcattcttaagcagatatgtaaccacattattctgcagatgtatgcatagggccaaatgagtactaatatgaaagttttgccaatttgcagtagtgataccatagttaaatatcatttgaacatcaagaagcagaaataaattaattcaaacagatgttctgtatagtcaatatacctttagccgaagttatgttctagattgcttagtttgccacacacaaaaaaaaaaaaaaaaaacaatagaatagaagtccatatgctgctcaatcagagtattactttaaaaggtatatatgtagtctgaatttgaacacaagctactactggagaataatgtcaatcataaatatattttacctacgtttgattacatgttagcgtcagcatgttgacttcaatccatcaagtgtcacctttgctaggccatcaggaaacaagcattaaattattagtcatgatatagatcgcgtattatactaaacaatactaaaataagttcaggaaccagcatgcggcaagtacaatgcaagaatgaaaagacgggactaaatttttatctgaaatgctgcacttgaaataactttgaaaaagaaagcatatatgcagcacatgacggtgtactactagtacaagttcatctgccctggcattttcaatattatattttgcattgcccacccaattaacactctacagtaaacggtgtaagaggataaggtagttatggtatctaacattattgtaggtataggataggattgctttttccctacctattttattcctgatttgacataactttgaagactggtgtggacaggcatctgatagattcatgcatctggattgt

SEQ ID NO: 1032 - protein, 650 aa, Zea mays
MSDSSDFTELLWENGQAVVHARTRKHPPQQAAFPPFTFTCSSRAQAQQRQQPVPPLPKTGGGGLFADFSSAAAGLDAPRDNADLDDTVPWIHYPIPIVDEASPAAPALADSFSPDFFSELHAAAATTSLGPLPPPPPPVQHTGGDDNDNRSTPVPNPTTGRGPEPSKETHRAPVLPGPAGRPEPPQGPQAEVAPARKPRPESGAGEALMNFSIFSRPAAMARASLRQRPPHTGTDKASNNNATTSTRVESTVLQSASASGPRTAAAPAVFVDQRTAWPSQQPKDVRFRCAAAAPPPPPTPTAGNLQQERPSNNNNMTPPQKEVETRKASEAAGATATSSVCSGNGAGTGKDDESWRQQKRKTLQAECSASQDDDPDDESGGMRRSCSRGAKRSRTAEVHNLSERRRRDRINEKMRALQELIPNCNKIDKASMLDEAIEYLKTLQLQVQMMSMGSGLCIPPMLLPPAMQHLQIPPAAAHFPHLGMGLGYGMGVLDMNSAAAAAAAVPFPHMPGAHFPCPMIPGAPLPRGLGIGMPGRNTMPVFGVPPGQPIQPPFPSLAGLPVRPNLAPPHASSAAMDNMVQEQQQQQQHQRLNNGARLGASTGGDPQLQTIVQAERQHFSVPSSAQTESDQFLDGGGNRAICTGRNEAET

SEQ ID NO: 1033 - DNA, 7104 bp, Zea mays
ttacgtctttcgcgtgcagacaaccaaacacactctcagatcaagttaatgcatgtgatggtccagaagatgatgaagggggcaaccacacgatttgtgatttgcttgcttcacattttaggcttggaccatatacatgcatatatttgtggcagttggagcccacacagaaaatttggatcaagatgttagccatttaaaggcgagtcgaaatttcatgtttttgtgtatttttgcatagtcatatgcgcgatctgctagtcataatatctatatccgtgtcaaaagctcgagagtgaagaacaaacacgatgattttaaaatttcgtgtaaaatccctcattaaagacaattgaaatgagatccctcaattaaatttggagaaaataaaaaaagcatgggcacttttgccgtaatgaaagattaatttagaatgtttacccactttctatccaaacttatccgggaacgctgtagatgggcagagatggggtgtaacatttacacaccgccttacttagaaacatttcaaatttacaaatttaagaagacatttctcacagttgtgattatacagttatatttaggaggtgtttgtttggattatataatttgttgttcaaaatttattagattatataatctatttagattataaacttaaacaaacacccctttaagcatagaccgttcactcaacacaatcattcccaatttctaattgcacaacattgcaacactaaaaaagtattttagtcatctatccgcatccattcatggtggcatcaatttcatatatagtatactgtacaaaaaaatcgaactgaaaaccagcaccaaaattcacaagaaaacggtaacaagaaaagaattaccaaaacgtctgaaaattaccaaaacacccttctcatcaacctcatcacctacctacactccctcttccagagaatccagtggcctcgcctctcctataaaatggcggctgccggtgtcatcctctcctctccgctctgctccctccgccgtgcgctcgaacgaactccacacgaaattctccgcgtaaagttggggagcagcgaacccgtagcgcgcgccccggatccctccacggggggcaatggcctcgtcggcgttcctgcccgagctgggcacgcaggtggtggtgcccgtcgcggccgtggtaggcatcgcgttcgcggtgctgcagtgggtgctggtctccaaggtgaagctctcccccgagccgcgccgcggcgacggctccgccgggaagagcggcgccggcgccggcgccagcgagtacctcatcgaggaggaggaggggctcaacgagcacaacgtcgtcgtcaagtgcgccgagatccagaacgccatctccgaaggtgaggctgtgcgcccatgccgctgttcgtgttttcggatttttgtggatccgagggcgcttgatcgtagatcttgtggttctggctgtttagtggttgagaagctcgactgctttgcttcggtgttgggtgggtggtcgttctgcagtttttattgttttgtttgcttgcggcgggaacctaataagttttacttactcgattatggctcatatcagtttgcagtgcagagtccaccaggcgcgcgaatagaatttcaggcgtttcttaattctttaggcggtttagtttaaaactgtgctctcgatcagctagtgttccttgtttgttagtttgttttatggattaaggcaattcagtctaaaactgtgctctcgatcagatggtgtcccatgtttgttagtttgttgcatggatttttcctgccgtgtgcctgcacagtcagatccaacaataaactacggatgctcccgcttaacacagcgcatcttatagtttttagctgcgtgtgtccttattgcggtaactaaactgtttctcgtccctactagatttttttgtgagatatttgtggtggggctggatgtgttcatatatacagatctaatggcagtgctctgttctcaagaggtcccggtataagtccttgctgtgaccatcctgtggcctgtgctgtgagcctgtgaccatcttgtggcctgtggggataggataagttactgcaggcagcagatacgttgcttgctgcacctgtggtccttgcttccctagtaggataactcgataacgaactttccgtggatttgcattattgtagcaggtagaaaatagttttgttttcaaccgcatccgctgaacttggaaggaatcgtagtcgtagaacagacgcacatggaccagagatcttgtggtccattcaacagtgtcatgtaaggtaattattagtgcacagtgcctgtctgaaggtacctgcagagtttaaaagcagtttgtcctctgttgggtgggtgcttgcattattggctgcctcatgttggtaatgatattggttggattctggccatgtctttgctcaggattcgtttcttacaataggattagcattatggtgattggtttacgcttcccttgcagagccatactatgctcattatccttacaggaatcagcagagtagtccgtatgaagatttttgtgaaacagcagagtagtccatatgaagattttgtgaaccagcagagtagtccgtatgaagattttgtatggctcttgtcccatgatatgcacattttattagttactttagtattgctactttctgctttgcttccctttctcatgaggagatgaggattacagtccatcatttatttttaacttaggtattattctgcctattttgatgttgacatgcttcttgggtgacatgtccagttgtgtcgtagttaacatcacaacaataaaagaggataagtactgcttatcatcctattgtatttttgctgttaagtcaatatcttcagtatttgatagttctgtcatcattttttaggccttctcttagtagcgattattctccggttttattgtataattgtatttgcacttgtggttctaaataagccttgctttgttttaaacaggagcaacttctttccttttcaccgaatacaagtatgtgggactattcatgggcatttttgctgtcctgatcttcctcttccttggttctgttgagagcttcagtaccaagagtcagccatgccactacagcaagggcaagacgtgcaagcctgcccttgccaatgctatcttcagcaccattgcctttgtgcttggtgcagtcacctctcttgtttctggtttccttggaatgaagattgccacatatgcaaatgccaggacaactcttgaggctaggaagggtgttggaaaggcattcattactgctttccgctctggtgctgtgatgggcttcctgcttgctgctagtggcctttttgttctttatattgcaatcaacttgtttggaatttattatggtgatgactgggagggcctttatgaggctatcactggttatggtcttggtggttcttctatggctctttttggtcgtgttggtggtgggatttacactaaagctgctgatgttggtgctgatcttgttgggaaagtcgaaaggaatatccctgaagatgatccgagaaacccagctgtaagtattctatttctgaagagtcacatcttaaacatgagttaatttaatcctttgtgctgatgctctgtaacatgttattgaccacggtaatgtcgtttggatggatatttacagttttacaccaacatgttacattgaaatctgacttctgcttcttgcaggtcattgcggacaatgttggtgacaatgttggagatattgctggtatggggtcagatctctttggctcttatgctgagtcttcatgcgctgcacttgtcgttgcctcaatctcttcatttgggatcaatcatgaattcacccctatgttgtacccactcctcattagctctgtgggtatcatagcttgcttgataaccactctttttgcaactgatttctttgagatcaaggctgtagatgaaattgagccggctctcaagaagcagcttataatttccactgctgtgatgactgttggcattgcacttgtcagttggttagggcttccatatacattcacaatcttcaactttggtgtgcagaagacggtgtataactggtactgccatttcttcaattgattccctatattttaataacatttttttcttcaattgatttcctatattctagtaacatttgttcttaaatacacctcactttgatctaaatttggtaggcaattattcctatgcgtggcagttggtctgtgggcaggactagttattggatttgttacggagtattacacaagcaatgcatacaggtgcatacaattttgatcatatttattagttgctctgatttatatattgcttcaagcatctgactacatgaatttccttgtgcagtcctgtacaggatgttgctgactcctgcagaactggagctgctacgaatgtcatctttggccttgctctgggatataaatccgtcattatccctatttttgctattgcttttagtattttcctcagcttcagtcttgctgccatgtacggtgttgctgtggctgctcttggaatgctcagcacaatcgctactggccttgccattgatgcctatggtcctatcagtgacaatgctggaggaattgctgaaatggctggcatgagccacagaatccgcgagagaactgatgctcttgatgctgctggaaatactactgctgccattgggaaggtaaatgtcaatctcactgttaattacaatatgtttcttcagaattggccacaacactttcaatgcatttgttattttcctttgtaaaatgtgcatttgaaggactaaatgctcactcccatgattttgtgcatgtagggttttgcaataggttcagcagccttggtgtctcttgccctctttggtgcttttgtcagccgtgctgagatctcgactgttgatgttctgacacccaaagttttcattggactgattgttggtgccatgctcccatactggttctcagcgatgacaatgaagagtgttggaagtgcagcactcaagatggttgaggaagtccgcaggcagttcaacaccatccctgggctcatggagggcattaccaagcctgactatgcgacgtgtgttaagatctctactgatgcatctatcaaggagatgatcccccctggtgcacttgtcatgcttacacctcttattgtggggatcttctttggtgttgaaaccctctctggagttcttgctggtgctcttgtttctggtgtccaggttgacactctttttcaacatatatgactgttttcattgttataacctcttgccatgctgcatgtttcattcataatctatattgtttctattcagattgccatctctgcatccaacactggaggtgcctgggacaacgcaaagaaatacattgaggtaaaacctggagacgataacatctcagtcagaaggtttgttccaaccccatatttgctcaattggattaaatttggttctgctcatggattttacaggctggtgcatctgagcatgcaagaaccttgggcccgaaaggttcagacccacacaaggctgctgtcattggtgacaccatcggtgatcccctcaaggacacctcaggcccctcgctgaacatcctcatcaagctcatggctgtcgagtcccttgtctttgctcccttcttcgccacccatggaggcatcctcttcaaatggctttagaggaagaatggaagatggatgggtagtttatttttgccgggggagagcactagatatatgtcatagagaagtttcagtttacccatatggtgcacttcatccttttttgtttcgcttgtactgtgtcgcagtcttgttgaacttgtcagccgtggtatcacctagttgttgggtctagttgcagtagccgagtggagcaaaaacgtctagcattctacaggattggagtttggacatggatgtgttgggaagtttgatactgcatgtagatatttcgatgatgatgatcaaggaatgcacaagtcagatttacctgtgtttgtgaaacctgaaactctgcgtaggagtgtatggcggtagaatagtcaatcagagaccgatcaaaatctgtaactcaaaatcaaaatcacgtcgctcagataaatgataaaactaacctaattaaaatcacgtcgctcagacttatagattcaaaagtttaataacataataaatcatatcgatcgggcttttgagtttaaagttattaacaaattctagagtataacaaaaaaaacaatcaaactctaattttaaaattaagcaaaactatagctcatcaagatttgcttcggatataactagggatgacaatttaacccgcaaacctgaaacccaacgggtacacaacccgacgggtgcgaatatgggtgaagattttgacccgcaggtgcaacttgcacccgacccaaagtttcgcgggtgcaatttctatttcaacccgcgggtgactcacacccgacccggaatttggtttatttattattttttgtgcaatgatgattaagatatagtaattattttcaataagtgacttggccaatgattcataaagtgttttattgtttatcaacgtgagaagacttaaaatccataaatataactaaattattgcttgtatttaattgcttatagttgaaattatcgcttaaaagtgtacaataagtaaaatccgcgagtgactcaaaacccacccgaaacccaacgggtttgggtgcaggtttagaattacaccctcgggtatgatcgcggatgggtttttgctccacctgacccgaacacgaccctttgccatccctagatctaacaagctatcatgcattgacaattgaattggactgtacaatggtggccatggtgtagcttgtaattctatagccaatggaaaagcatcatcatatagaaagtcatcatagttgttgtcctcatgacaaaggttcctcttacaatgttgctcttctggttgttcaatttgttgtgttatgttacgcatttgctttgatgcttc

SEQ ID NO: 1034 - protein, 771 aa, Zea mays
MASSAFLPELGTQVVVPVAAVVGIAFAVLQWVLVSKVKLSPEPRRGDGSAGKSGAGAGASEYLIEEEEGLNEHNVVVKCAEIQNAISEGATSFLFTEYKYVGLFMGIFAVLIFLFLGSVESFSTKSQPCHYSKGKTCKPALANAIFSTIAFVLGAVTSLVSGFLGMKIATYANARTTLEARKGVGKAFITAFRSGAVMGFLLAASGLFVLYIAINLFGIYYGDDWEGLYEAITGYGLGGSSMALFGRVGGGIYTKAADVGADLVGKVERNIPEDDPRNPAVIADNVGDNVGDIAGMGSDLFGSYAESSCAALVVASISSFGINHEFTPMLYPLLISSVGIIACLITTLFATDFFEIKAVDEIEPALKKQLIISTAVMTVGIALVSWLGLPYTFTIFNFGVQKTVYNWQLFLCVAVGLWAGLVIGFVTEYYTSNAYSPVQDVADSCRTGAATNVIFGLALGYKSVIIPIFAIAFSIFLSFSLAAMYGVAVAALGMLSTIATGLAIDAYGPISDNAGGIAEMAGMSHRIRERTDALDAAGNTTAAIGKGFAIGSAALVSLALFGAFVSRAEISTVDVLTPKVFIGLIVGAMLPYWFSAMTMKSVGSAALKMVEEVRRQFNTIPGLMEGITKPDYATCVKISTDASIKEMIPPGALVMLTPLIVGIFFGVETLSGVLAGALVSGVQIAISASNTGGAWDNAKKYIEAGASEHARTLGPKGSDPHKAAVIGDTIGDPLKDTSGPSLNILIKLMAVESLVFAPFFATHGGILFKWL

SEQ ID NO: 1035 - DNA, 4185 bp, Zea mays
gcaacagctgattctagctccaactcgcgctgcctggtgaaaagcaacggaggagggcctccatacacagtgcttgttgcaagtagctagcaatcggtgtggttccagaatccagatttgatggttcaggaatgtgctagtatgatacgacgtcatgacagggcgtaacacgctgtgctgccacaagtttttgctcccttttcgtgtcaaagggattagagatgagggacacagccaaagcctgcgcacaacacgacatttcggttgcacctaatcaagcgcatagctgcaggcattaggtggtccttgcgatgtgccatactgctgattgagtagctctccgttggtggagaagcatacatactgcgttgccaccaggcaaacgacaaactttttttgtaaaagaaaatttctggcaaattcttatagcaagtttggttattctctattcagaagtcggaaacagggatacaaattcgcaaaagaaaagaaaacggagaggtacagaaactcactgtttgcctgaagcacgtagagactagagaggtgggtgatcttcgctgcaagcgtagcagtgcagaggcatgcatatggccactgcagacttcactgacgcttgtgcctccctcaccattcaccacacattatcagacgcagactagaaacaatgacacgctgacacacgcatgtatcgtcgccgaatgaagcttagccactgattaaatctagccccaacccccgtattaggcagagccaccggttaggctccagaattatctaacgacgatgagcgctttagtcggtcgcggtcggcaaaattataaccccagaaacctccctggccagacgctcggctccggccggggccttatctctgaggaggaggagaggacttaaacaatccaatcatgaagcagccgcctgttgctgtcacgaaccaccgccaccgtctcactcccactcgccctccttaaatacctcgcctcgcctcggccagtctcgtcaaaagcgagagagctaagctaagccgagctaagaagcacagcaagtctcaccagactagcggctagcgcgagaatggccaaggacatcgaggccgcggcggcgcacgagggcaaggactactcggacccgcccccggcgccgctggtggacgcggaggagctgaccaagtggtcgctgtaccgcgcggtgatcgccgagttcgtggccacgctgctcttcctctacatcacggtggccacggtgatcgggtacaagcaccagacggacgcggcggcgtcgggccccgacgcggcgtgcggcggcgtcggcgtgctcggcatcgcctgggccttcggcggcatgatcttcatcctcgtctactgcaccgcgggggtgtcgggtgggcacatcaacccggccgtcaccttcggcctcttcctggcgcgcaaggtctcgctggtgcgcgcgctgctctacatcgtggcgcagtgcctcggcgccatctgcggcgtcgggctcgtcaagggcttccagagcgccttctacgtgcgctacggcggcggcgccaacgagctcagcgccggctactccaagggcaccggcctcgccgcggagatcatcggcaccttcgtgctcgtctacaccgtcttctccgccaccgaccccaagcgcaacgcccgtgactctcatgtccccgtaagttgctcagcgcacgacctccgatgagcttcatcgtgttacatacataccgatgctttgcgcttctgctttgttcaggtgcttgcccctctccccatcgggtttgcggtgttcatggtccatctggccacgatccccatcaccggcaccggcatcaacccggccaggagcttgggcgctgctgtcatctacaacaacgacaaggcctgggatgaccacgtacgccctacacacacagacaccaccccttctcccgctgaaagttctactaacaataaattaagtgctaattgcttacaggcatggctggccgctgccataccaacactgacctaaccttaataaccaatcgaacaaaactgttgcgacatttctcagccgtagggtttattactagataggagcagatagaactgatatattattataacaaactggatgctcaggataaggctcaatgatgatcacttagttaaactgatcagcagatgtcatccaaattgattattagtatgcagttgttaatttagtatgccattaacacaggcactttcagctgtgtgattaaggtctgtttcgttcctttagtgacaaaagtttagtccttaccttttttatttctaggaactaaaaatattcaaaacatattaattgactcataaaaatatcaaaatgctcattacgtcattagcattttactgtcattaatgcaactgaaataaataagggataaaaagtaaaattaatataatttagtctcctttagttacctcttgtgggattagagaataaaacagtttaatctatattttagtcccactgtttgacaatttaaatactaaataaaactaaaatatagggactaatttttagtctctcaaactaaacggggcctaaaaacaaagcacgcggcctaatctgttcccaacaaccgccctccgacctaactccaaaaaaacattaatctacagtgtgtgaccaaaatacctaaatgttactgcagctacactgattaattcataacaacatttgtaaattgaatcatcatatgtcaccaacaccaactgatatatacgaaatcgcaatccactttgatgaagtgatccgcaagtatcagtcgaggtgtcttacatgggttgcatgtcctgtcgtctgtaattgcagtggatcttctgggtgggtccattcatcggcgccgccatcgccgcggcgtaccaccagtacgtgctgagggccagcgccgccaagctgggatcgtctgcctccttcagccgctagatcgatggcctcccgccggacaaggacagccggaggcgtgaactgtagatataccagaggctggacaaggacagcgtgtcgtcgttggttgcctctagccatgcgtcgttatatatgcatgccttatgatcagtttgtatttccactgcattttgcttgctttaattttccttccaagctagtgtgattgttgtgctgtacttatccgtgtacgacgagtcgacgactgggtaaaatgaaaaagaaaagaaaaaaatgcatatatttaagtttttaaagggtttgtacgtttgtttggatttctcctctgaactttggagctctaaactttagagttaaagctctaaacaactgctctgaagtccaccttatattagagctttagagttaaaaaataaactgaggtgctctaaaacttttaaagctctaatacaaaatttagagagaagtcgatccaaagagtatctttaatacttgaagttgaatgctttttgttgcctcgctcgtatcgctgctgatgcacgctgcatatatgatatgccatagtgcctctggcaacggcatcacaccatatggggcctcaaatttcagaaccattcggggaacctttggaagttggaacacaggatttcaggacgcgggaataaaaaaaaacttaggattacaatgatctcaatcttaaatcatattggttgagaaaaaaaacttagccgtgtgtgcgcgccgcgggggcatttcctaccctggtcctggtgacggtttgcctggccttgatgatcaatggcgcttttctcgactctcgtggccaaaaggtggaagctttcgtctggtcttcttttggcttgccgatcaattggttgttgaagttgggttgcagagagttctttctggttctgtctgggcgtgatgagaatttcttttaaatataagctaagaagatgaagatcatcaacatactcatctacactatggcgaaggtctagtttaacctaaattagagtccatctcaaattccagaagcagtaccagataaaatcgacgttcgagactacattttcgataatccacgtatgcatagacaaacagtttgataagctaaccaatagctttggttggacgtcaaaactcatcataaaccaacaaaaatcatcgaaataagttaccattacagaatctgacaaggtgtcgcagcaccgtcttttggtgtgttcgcacatgtaccat

SEQ ID NO: 1036 - protein, 285 aa, Zea mays
MAKDIEAAAAHEGKDYSDPPPAPLVDAEELTKWSLYRAVIAEFVATLLFLYITVATVIGYKHQTDAAASGPDAACGGVGVLGIAWAFGGMIFILVYCTAGVSGGHINPAVTFGLFLARKVSLVRALLYIVAQCLGAICGVGLVKGFQSAFYVRYGGGANELSAGYSKGTGLAAEIIGTFVLVYTVFSATDPKRNARDSHVPVLAPLPIGFAVFMVHLATIPITGTGINPARSLGAAVIYNNDKAWDDHWIFWVGPFIGAAIAAAYHQYVLRASAAKLGSSASFSR

SEQ ID NO: 1037 - DNA, 3064 bp, Zea mays
tccacccacgacaccgtcgtcccctccccctcacccacgccgccgccgtcatccacttctctcccgaggaccgtagcattaatatgagctatatatatgctagtagtagtaatggttgatccaaacaaaacaaaagtatatatattaatatcataacgtagaggctcaactaaaagctttccgttcagtaaaatattacttcatttattttaaaaggatcgtagcattaatatgagctatatatatgctagcagtaatggttgatccaaacaaagcataagtatatatattaatgtcataacgtagaggctccactaaaaaccctctgctcagtaaaatattacttcattcattttgaactgtaataagtatttttaaattttctgtggtgtaagtcactacaggttcaggttcgtcggattcattttgatgaatgtcatcaattcactttcactatgtgtcaagtcacctctcactaccttccacgaacgcgttgtcggcgtgttggcaagcccgcccgctcgggaggagtctctgcccctgcattcgaggcctgctcgacgcaggtccctatcgggttttgcttgtctgtcctagcttgtatttgcatacgtggtgtaggagtatgagttgtttgtggttaagttcgaatagatacgcggctagcaactcagtttgccgtagctgtagcctgtagcgccatagacacgtcacacaagcggtcaatagacccaggacacgtcaggctcagtccctccacgtcctcactcctacgtggaagccacccaggggcccaccccgtggatcacgcacctgatcccgcgtgccctggcccacgcggtgggcggacggccccggccccgccagcgtggcggaaacggacggcatcggtggatgccggctggcccccagacttatcgacaaacaaacggccggcgccgcgacacgtcgccccctggatgcgttcttatccccacgatgcatccgacgaccgctgccccattctccactccgctctctcagtctcaaactccccgctctcccccgcccgtccagctcgtgctccgcctccgctgctctgtcctcttccctcctctgcgtttctcctcagagctgtttgacttgaccggacagtgctgttcggtggctcggccgcgatgccggactccgacaacgagtccggcgggccgagcaacgcggagttctcgtcgccgcgggagcaggaccggttcctgccgatcgcgaacgtgagccggatcatgaagaaggcgctcccggccaacgccaagatctccaaggacgccaaggagacggtgcaggagtgcgtgtcggagttcatctccttcatcaccggcgaggcctccgacaagtgccagcgcgagaagcgcaagaccatcaacggcgacgacctgctctgggccatgaccacgctcggcttcgaggactacgtcgagccgctcaagctctacctccacaagttccgcgagctcgagggcgagaaggcggccacgacgagcgcctcctccggcccgcagccgccgctgcacagggagacgacgccgtcgtcgtcaacgcacaatggcgcgggcgggcccgtcgggggatacggcatgtacggcggcgcgggcgggggaagcggcatgatcatgatgatggggcagcccatgtacggcggctccccgccggccgcgtcgtccgggtcgtacccgcaccaccagatggccatgggcggaaaaggtggcgcctatggctacggcggaagctcgtcgtcgtcgccgtcagggctcggcaggtaggacaggttgtgaccgtcgccgtccatgcttgcatggccatggccatggcatggctcagtcccgccgccggcttcttgcttggtgtcggtaattagcgctggtggcctgcgctggttaagttaaccttcggtttttccccccttttcttttcgtggtaagtaatgttgtgctgaatggagacagtgatatggttaagatagctccataacatctcggtaattaatcctgtgatttgtactctaaagctgctgctaaactgagctatgacacaatacaaatgctgccattaacatttgacatgcttattagggtacctagtatgttacgactctggtaactactgaccgtgacattttttttctattttattaccctcacagttgactgggaactacttaattggtgctttccttccattgctgttgagataattttaaattttaaggtgttatgccacgtgatgacaagtgtcggcacgggcttaatcattcaaaaaggagaaaaatggtaccttgttttaaatcgtaagtgcttcttagatatagttttttttatatactcaggtatatatctgaaaagacagaataacttataatttagaataaaaaacaagcatatgacaagtagcatcgaatcttcgagaacaggaaaaaaagagaaacaatacaaaatcccatattctaaacatggtctaatattgtattatactgacacgaacttttgagaattaacttgtcgcgagccaggaaacctttttgagagaagagttgcgggtaagaaacttaagactgatttagacccggatttagcgtgtgttgcaagttggctgcaggacagtgtatcgtgtgttttgtttttcttgacacgtcgctttagtgagcactatttgcggaggcatgtgcacatgacaatttctcgtcagggagcgttacatcaaattcaagacagcacctatcatgatccttccgtactatagccttcatccatgctaatttggtactggatttccccccaggcagcaaacactttggctagaggtacacgaagatgatggcaactgaaaatcctcggaatcatggactcagcacactagcttgcacagcaatgcccagctgaaaaatgatgcaaaataagggtgaaagtagtaccaaataattctctaatctgatccatcatgaatgtgaatgttaaggatataaacaagagtttttactatccatgcggatacagataatccgaatgtgaatgtgtatggatgcggaaccaac

SEQ ID NO: 1038 - protein, 212 aa, Zea mays
MPDSDNESGGPSNAEFSSPREQDRFLPIANVSRIMKKALPANAKISKDAKETVQECVSEFISFITGEASDKCQREKRKTINGDDLLWAMTTLGFEDYVEPLKLYLHKFRELEGEKAATTSASSGPQPPLHRETTPSSSTHNGAGGPVGGYGMYGGAGGGSGMIMMMGQPMYGGSPPAASSGSYPHHQMAMGGKGGAYGYGGSSSSSPSGLGR

SEQ ID NO: 1039 - DNA, 3322 bp, Zea mays
ctatccaatcagaaagcagtggcatcgcaagtagcaacggtggagctagagagggccccggtatatccacatcacctcccactccaaccgacagcccgggaccatgcatgcgtccatgcctattggattctacctcctactgtggtagcttttaagaccagcaagggtacgtgaagcacggacgagttcagagagtttgcgcgcagttgagctcccatcgcgcgtgagcgagcagcagagcagcgcgacgacagggcagctgggcaggcagagctgagctcatgcgggagcggccggctgaactcaaaactcttcatccctgacactgtgcgtggaatcacgaaacgcagagctagcgagcgagagcggagtaaatggcagcttcattcaaagccgccgcaggctccccaccacccaccgcgaatgcggccctgcctgcctctccggcagcccgcttgggcccggagccgcagccgttgccgttgcagcaggacacacagaccagaggtctcggcagagcggcagccggcaggccctccgcgcgagtcgcgacgcgccattcaaagacgcggcaggcgctgttgccgtatccctcgtcgtgatcggccccgttgccaggaattattcgtcctcagtgcgcggcgcgcgcgcgcgtcttctgtccagcagggccgatcttgaatggccacgtcgcgtctcgcccccggcccccggggctgcgtgcgtgcgtgcctgcctgccctgcgcgaggctccagcggcgggcgggcgggcggggcgcggcaggggtcattgaatccatatgaggggccgaggatcatgtgacgcacaatcaaaggtcccccgcgcagccgctgcggcgcctctcatcaatggccgcgcgctagctgctggctgctgcctcgcgagcgagctcggtgtcgtacactcgtacgtgcatgtgggctagctgctgcggcctgcggctatatatatatgtacgctcggcgcggcgacgacgtcgtgctctcgtctcgtgcaggtgcagctagccctcgcctcgcgcagcagcaaaggagctatatcagctgcctctgcctgcttcgctcgttcccatatagagccttcgttccggccggcctctcgatcggtgctccgccgccgccaccgtaccgtcgtcacacgccgcgcgcgcgacgtcgtcgtctcagctagtagccgacactgtcaagcgcgcgcgccgggctcgtgcggtttctctgggccgatggggaggcacactggtgctggaattcactgctccgtccctctcgctctgacggtagtagtgctgctgctgctcgcctccgtctcagtgagtcatggcatcagaccagctcctggtaagcgcacagctaccgcatgcatgatacgcatccacgttcttccagacgcgcattatattagcgatcgatcgagttcttcgtttaatttgatgaacagttgctggggcgaatggactggtgcatgactcgacggcagagatggtcgtcgtcgccacagcaccgtcagctcctgcgcaggtatatatatatgtagcacacatgattgcatgccattatttcaactaccaggctcaacaacgttggctcgatctgaacagactaatcgcacagttgcaccactgatcaccatatgcatgtgtcgtttcgacccgtgtttcacgttgttagttacgtacgacgtttagctgatgcaggggaggcagatgagcaggggcggcaagaaggacgacgacggcgacgacaacgtgctgctgcgggaggaggtggtgcgcgcgacggggtcgagcctcccggactgctcgcacgcgtgcggggcgtgctcgccgtgcagccgcgtcatggtcagcttcaagtgctccgccgccgagccgctgccgtgccccatggtgtaccgctgcatgtgcaggggcaaatgctacccggtgccgtccagctgacggtgatgcatgcatgccgtccagctgtgcgggatgtggaatgacgatcgattaccctgctaataaagctagctagctatagcacttatttaatttatgcatgtggagagttggagacttcttgatccgtttgggctaatcacggtgttacggggcaccttttttgtgtaaatgacgatgggcgatgagtcgttacctagcgctagctagtgtgtgtgctgtggagaagatcgagatcctgatgatatgcatgatttttttttttttgaggtgtccgaagggtgttgcattgcactgtagggtactaggagtctaggatgcatgaacagcaggacaaggtctctgagacacgctatgtgttcgacccctttaatttaatttggtagatgtacgaggcttcttttggtaatttaaatactctcttcatttcaatttataaattgttgacgttttacatcaaatttgaccggctcgcctcattcaaaaagtttcataattattattaatttttatcgtgataacgtgtagcgtataatgtgctttaattacaactttaatttttttttgtttttttcataaaatacgaataagacaattcagtcaaacatagtaaaaaaatcaaatgaattataaattataacagaatgagtaagactgtctccaacaaggaacggtatatggttctgttcgttaaatttggaggacgctgaactactttatccatccaacaacgcacggtaaagcttccggtaaaattagtccgacactctaaatgtagagttcctctgggcgtttgctatttgtcactccctctccctcccgtgctaccggggtggaagcttcccctcgcgcattccatgccgcaggttggagcacgacgggtgcagtcgagtccatcgcgaagaggttaccgaagctaggtaggtccagcggcggagcaatcgccacggacggcgatacgtggtggtgcgggtctacgccacctgcgaaacactcaaccatggacacagcgttgtaactttgggagcaatggcatcctcgatctccgccactttgatgacaacctcgatcccccacgctctcttccaccaccttgctgctacacaacacgaccagcagctggggcagcaccatcaggtcaccgcttcgacaacaggaagcaaagcaacgcaaggagagagaaggggattttttacggcacatcaccaaggacccataaataagaaagccaatgaagataagaaaatgacataattattaatatatatttaaaatgatttgctatatggacaatattttgtttaaaaatacgggttctaaaatttctgttaatgtgtttgagaaaatatataatatgagatat

SEQ ID NO: 1040 - protein, 145 aa, Zea mays
MGRHTGAGIHCSVPLALTVVVLLLLASVSVSHGIRPAPVAGANGLVHDSTAEMVVVATAPSAPAQGRQMSRGGKKDDDGDDNVLLREEVVRATGSSLPDCSHACGACSPCSRVMVSFKCSAAEPLPCPMVYRCMCRGKCYPVPSS

SEQ ID NO: 1041 - DNA, 3030 bp, Zea mays
agatttggaaagagcgaaaccgcagaaccttccaaagcctagagaagtcagagtgtgtgattgcagggttaatcaaggatgtttttgggcagcaacgaattgctaattcttttgactttggttgctagtgtctctgcgtagcgttctttatctttttttctcattcttgagttcttgggtgactttttctggagctgtttgactagttaagtgtctgtaagtgtgttctctttttcctcttaataaagcttggacgtggcaattctcttgccgcgtctatcaaaaaaaaatatgaattatattgttattatcaaaatgtagcccaaccaatatgaatcgagtaccagcggcacgagatatataaaaaaacagtgcatacaagcaaaaaaaaatcattgaggtgctctgaacattctgaatctcagcaccaagctaatgggggatgtcggtgccacatccaacaatgcaatgaaatgcaatgcaatcagaaaagcagtgccatcgcacggagccgagcatcaatgcaatgcaaggcactttcaatctgtccactcttcacttcccagcatgaggccgggaccatgcgtacgtttgcgggaagcacgcggacgagttcagagagttcgcggcttcgcgcacagttcagttcccgtcgcgcgtgagtgagcagcagagcagcgcgcgacaggtaggccggcaggcgcttgcttttgccgtgtcctccgtcggcgatcggccctggcccccgtgaatattcgtcctcactggcggcgcgcgtctgctgtctgtcttccagcagggcccggccttgaatggcccccggttggcgctgcgtgcctgcacgacggcctgtgcgaggctccagcagcggcaggggtcaggtcattgaatccatgtgagtagccgaggatcatgtgacagccgctgcgcctctcatcaatggagcaaacttcccatatagcctcccgccccgatagccgcctctctcagagtcagagtcgaccaagcacacgccgaggtcgtactacgatctctctgggctgtgaattgtgatggggaggcacgctggcggcgtccttctcgctctgacggtggtgctgctgctcgccgccgcgagtggtggcgtcagaccagctgatcctggtaataagcagtgcagtgcgtgcacatctacatctacccgcttgatgaaacggatccacgtacgtacttttcttccagagatggacgcgtttatcgatccatcgagttcttcttcgtctcaacagctgctgggggccaataataacggactggcgcatggatcaacggcggcggcggagatggtcgtagctgcgccgtcagctgcacagcaggtatatccgtatatatactgtcatgtcgaccagacgactccacggatctgaatcatcaacgcagatatcatgcatgcgctagctagcactgatcatcacgtacgtttagctgcaggggaggagaagcaaggacgacgacggcgtgcttctgcgggaggaggtggtgcgcgcgacggggtcgagcctcccggactgctcgcacgcgtgcggggcgtgctcgccgtgcagccgcgtcatggtcagcttcaagtgctccgcggccgagccgctgccgtgccccatggtgtaccgctgcatgtgcaggggcaagtgctacccggtgccctccagctgacgatggtgccgatcgattaattagtcgccgccgccgggatggagatgacgatcgccatgatgacctcacctgctacgtacgagtagctaggtagcactacttgaaccttacttcatctatgcatggagagttagttggtcgagacttctcccgtctgagctaatcacggtggttcggaacagtttttttgtagagatgagtcgttagctagctggtactaatatgtgtgtgttgtgtggaagagagatcctgatgacgagtcattttttttggctgtacatgtatcgtgtattcctgtgcacaggggctacacccgtgcacaaatgaattattggccgccgatctaggatccaattgtccatgcgtaatttacaaaagacccctcccgccgtcacctgctgccgccgccatcgtcttcacgaacgccataatgacctgcgcgtcgtcggccccctgtgttcatgacgaatgtttaattgttttaaaaaagcatattctcaagagtaacagttggacaaagagattgcagggagaatatcctgagggtcgtggggttgcagcaataatctgatccttactgaaagaattcagagacgagggttcacctgctactgttttcctccaatctatacatcatgcttttctgtacccctatttcaattctttgcaaattgttttgtcttctagctcctaaaagcatgtgcatttctgtagcgataatgcacatatattcgagttgccatacaacagtcattgtgtcatgccaagaatcgatctcaagctcgacactagcagccccacatgtcacggattaagctcaaacacgacactagcagctcttagggggtgtttggattcatgtactaaattatagccccaatcacattaaatgtttaggtcttagttagaaatactaaatatggtatacttacaaatttaactacatatacgacgactaaaaaataagatgaacttattaaatctaattagtccatgattcgttcatatctgtcttagcgtttagtattcatatgtgtaattagttttataattagaatatatttaatatttgtaaatgatattcaaatatccagtgtgagatggactaaactttagtcacgtaactcaaacacccctttagatgtatcatgctagtatgctaggcacgacaagcatggcgtgtccatagttgctcgaccttcacctttgtataaataacaccgtcaaccctagaattcattcaaactttaaaataaaaacatgttcatacaaaatttatataaaatttgttcagggttaacatctcataacatgtacataatgattttatataaattttat

SEQ ID NO: 1042 - protein, 147 aa, Zea mays
MGRHAGGVLLALTVVLLLAAASGGVRPADPEMDAFIDPSSSSSSQQLLGANNNGLAHGSTAAAEMVVAAPSAAQQGRRSKDDDGVLLREEVVRATGSSLPDCSHACGACSPCSRVMVSFKCSAAEPLPCPMVYRCMCRGKCYPVPSS

SEQ ID NO: 1043 - DNA, 4350 bp, Zea mays
ctgacactcggcaaagaagcaagctttgtcgagtgcttcctaggacactcggcaaagaaactgacaaaggggcccgctggtgaactcgttgccgagtgctaggccggcggacactcgacacagagttccctctcagccgagtgtcacctaatacactcggtaaagaaattatctttgccgagtgtcatctagtacactcggcaaaggcaccgtctccgtcaccagccgccgtgacggcgccttttttccgagtatcggacgacactcggagcccaataataagtactcggctaagaagccgttgccgatatacagttcgtcgagttctctttatcgagtgtcacacctatcaaaaccttcgctggttgtttttcaggctttaccgagtgcttcagacactcgacaaagagcctgattccggtagtgaactaagtcgttcaaaatagattttactattttttaaaccacgcgtcatggagtctacggaatcaaatatcatctcgaaagcactttgaatacgagatctaatttggctaaccgttagtcaaagtttataataatttggcttgtttatctctgagaaatgtcataatgtaggggtatattataagaaagatagcgcgaaagggtggtcttgaaagacagtataaattgcatgtagtcgaactttacaaccatcagctaacaacttttagctgttgtgatataaaatcgatactgtactagtagatttgttatcagatgtgatatccagtaatcatagattcgtactcataaacagtataaatatataaaaatataaatggatggataaatttatttaatggcccacggattagttaaacccaagtccgatccaaaacccaatccctccagcggcacatccaccaacgcatcaataatattccatggatcccagcggggccctccaatcgccgtccgccacctggcgccactggtcaataacacaagcggccgcccgaccgctgacctgccgcgccgcgtggtctcagtagttgctgagaagagtggtgagatttgggaagctgcggctcgacattgcgtcctgtgctttgcttgccgcgtcgtggatcgtcgtcgcatgcggagccagccaagctggacacggtgacggagatagaggccgacatggacggcgtgctccagcgattcgacgtcgacctcctcctcgacggccacggccacggcgacgacagcctatgtgaggagcggcgctctagctcctcgatccggctttcggatcgctggttgctcatggctgtttcggtgggtggatccgtgtgtgtgcgtgcaggtgggagcgagcggaggagcgcgagcggcggcggcgcgcaggacaaggcgggcatcgacggcgcggtgaaggagcggatcgcgcgggcgctgaggatctacaaggacgcggcggggctcgacggcggggcgctggtgcaggtgtgggcgccggcgcgggacgggggccggcgcgtgctggccacccggggccagccattcgtgctgccgccgccgcggtgccaccgcctgttccagtaccggacggtgtcgctcgcgcacgccttccccgtcggcggcgctgccgtgcccggggagcggggcctgccggggcgggtgttcgacgccggggagcccgagtggacgcccaacgtgcagtactacggcaccggcgagtacgcgcgcatcagctacgcgctcatctacgacatccaggccgcgctcgcgctgcccatccttgaccccgccacgggggcctgcctcgccgtgctcgagctcgtcaccacctcgcccaggctccacttcgccgccgaggtcgacaggctctccgaggcgcttcaggtacctcctctgctccaactctttcgtctgcctagctaagctacctgccccatccatcgcccagtcttgctgcagatgcaacaacagcatacactattcgtctagtccatgaaatgtgaccaaataatgcgatcaaaacggcgcaatttcgtccatttggtatttgaatcttctgatcatatcatctgctttccaaactcgtgttcacgtccatgccaatgcaatgcaggctgtggcgttgaggggctccgagatctgccgccgcccagcacccgaggtgcgtgccgtgcgatgcgaatggcatcacatgaaatctaagcaaaatttaggggggaaaacattcgatgccatcgatcacgacgataccatgttcatcgactgatccagtccagtgccgttgatttctcacgagccaggcatgcaacgacgatggggcagcggctcaggtggccatgtcggaggttgcagacatcttgaaccaagtcggcgaggctcacaagctgccactagcgcaggcatggaccaggtgcaggcgctgcagcaccgggacggagcacgcctccctgacggcggccggcgcaccgttctacctcaccggcgcggacccaaacccaaacctgctcggcttccacgaggcctgcgtggagcaccacctgcggctacggtccggccggggcgggctcgtggaggaagcggccgcggcgcggcggcccctcttctgcgccgacgtcaccaagtactccatggacgcgtacccgctggcgcaccacgcgcggttctgcgaactgtccggctgcctcgccgtgtgcgcgcggctgcgccgcggcggcgacgagtccatggacacggacggcggcggtggcggcggctgggacgagtgcgtgctggagttcttcctcccgccggactgcagggacggcgcggcgcagaaggcggcagcgggcgccgtcgcggctaccatcatggagcggtctggcggtggcggtctgaaggcggtcgtgataagcgggttgcaggatttggtgtttgacatcgccgcagatggcgagtgcgtgcttcggcctgatcctgtggccatggctgatgatgttcctcagcttgagctgaacggtcatggaggagacgagtgggactcggatgaggagggtctacatctggtggtagctatgggtacaaccactacagacattgaagcatccaagatgcaccatgacgaacaccatggtggcgaggatccgagatcacaagttggcaagaaggcggcgaaaaggaaaggcgagaaaactgtcagtttggaggaactgcagcgctacttctctggaagcctgaaagatgcggccaagagtctcggtggtgagtgaagaaaaaatttattttaggttcagagcagctatgaattccttgccgatccacatttacgcgaaaatgcagattgctgctgaacattctgacatgatataacatgcctctctccttgtgcagtttgtccgacaacgatgaagcgcatctgcaggcagcacggcatctccaggtggccgttccgcaagctcgccaaggcgaaccgctccctggacaagatcaagcgcgtcttcgagtcggtgcaaggctcatcacaggccatggccgccgctcctgctcctcctccacctgccgccgccgctgcttcctattctcagcaagctccagccgtggccgctgctcgccgcgcacctgctttatcaccatgcctatcgagtactccgagagtggcctcctcccaagcctcatgccaagcactgccgccgcctctgaaggaggccgcatggcgcaagcctttgcgcggcggggacgccagcgtggtcacggtcaaggcgagctacagaggggacatcgttaggttcagggtgccgagctcagcaggcgtcgcgacggtgaagggggaggtggccatgaggctggggctggcgcccggcgagttcgacgtcaagtacctggacgatgacaacgagtgggtgctcttgtcttgcgacgccgacttccaggagtgcctcgacatcgtcccggcgttgtcaggcgcgtcagcgtcgtctggctccgggacggctcagccggtggtcaggctaatggtgcacgaggtagctgaggtccatgggagctcctgtggcagctcagattagtcacaggaaatagagctgcagagctcaaccgatgtttggtacaaccatctgtagaagctttcactactggcatgtgtctgtctctagtctctctacatgtatccatgtccaaaaactgaagtcataaatacttacaaatagaaataggagcatctcacactttttgttgtctcagacagtacagatctggtctagtctagggcatagaaaagaacaaatcattgtgatctagcactggtattcgctccatttttaagtatatgactttcaggataggttaatttattcgtcatatatttaaatacgaaaggagcataagccaggataggctaatttattc

SEQ ID NO: 1044 - protein, 756 aa, Zea mays
MDGVLQRFDVDLLLDGHGHGDDSLCGSERRSASGGGAQDKAGIDGAVKERIARALRIYKDAAGLDGGALVQVWAPARDGGRRVLATRGQPFVLPPPRCHRLFQYRTVSLAHAFPVGGAAVPGERGLPGRVFDAGEPEWTPNVQYYGTGEYARISYALIYDIQAALALPILDPATGACLAVLELVTTSPRLHFAAEVDRLSEALQAVALRGSEICRRPAPEACNDDGAAAQVAMSEVADILNQVGEAHKLPLAQAWTRCRRCSTGTEHASLTAAGAPFYLTGADPNPNLLGFHEACVEHHLRLRSGRGGLVEEAAAARRPLFCADVTKYSMDAYPLAHHARFCELSGCLAVCARLRRGGDESMDTDGGGGGGWDECVLEFFLPPDCRDGAAQKAAAGAVAATIMERSGGGGLKAVVISGLQDLVFDIAADGECVLRPDPVAMADDVPQLELNGHGGDEWDSDEEGLHLVVAMGTTTTDIEASKMHHDEHHGGEDPRSQVGKKAAKRKGEKTVSLEELQRYFSGSLKDAAKSLGVCPTTMKRICRQHGISRWPFRKLAKANRSLDKIKRVFESVQGSSQAMAAAPAPPPPAAAAASYSQQAPAVAAARRAPALSPCLSSTPRVASSQASCQALPPPLKEAAWRKPLRGGDASVVTVKASYRGDIVRFRVPSSAGVATVKGEVAMRLGLAPGEFDVKYLDDDNEWVLLSCDADFQECLDIVPALSGASASSGSGTAQPVVRLMVHEVAEVHGSSCGSSD

SEQ ID NO: 1045 - DNA, 3528 bp, Zea mays
ggaacctgacgcttttgactttgcggtcgtacggtgccggatgcatgcgtcctcatgcttggctgatgcggtgtttggttcaagaaataagcatcttcttattttatacttttttatttaattagtgaaatagaatgagttagtttattacaatctcatttcttgtagttaattagttagtactaaaataagaaatacgatcatcctattgttcgattagcttttaatctatataaattggatgtaattttttttgaggatgatgcacatcggtgttgccgacgggcaagagctctcggagtctcggtatatcgctttcggccgttgtggtagcagtgtccgtgtcatgaccatgagtatatataataaccggggatgggggtagcggtgaggtagatttgccaacgcaagttggcagccagcaaggttcagtgcaccggccggctgtatcacacgtttcacgtgttaattagttttcgatcacggggcagggctacccctagtcgtaggctagtagctaggtccagcaacctgcactgcactgcactgcacctggataagaacgaccgacgacgctccgggcaaatatagtaccgtacacgtgtcagccgtgcactcgctcgtctcggccctagcccatacacgcacagcgacggcaacgcgtgcgatgcgactcacactctcactcgccccgccacgtgcctcgccacacgcgcggcggctcgagacgcctgcttgccatgccggcctacttctctctttttctttcttccgtacgggcactcgtgtcgacgcatgggtcctgaatcagctgacgtcgcccgtgacgccacccgcggtcccgtccaatcccgggtcgctgaggtggccgtccacgagcctgtcgcaccaccacgtgccctttccctcccgaacccacacccacctccgctttcccgcggcatcgcactaccgcccgcccgccgctatatatccttcctctgcccgcggttctcagcttcaatgacagcgcagaacccgcccacaggacaggacacacagagccgagccaccccacccaccatcggcgaccagcagccagccgcgggagcgagctgtttaaagacaccgagtcggagtcggacggaggactggcaggcacaaccgaagccaccgcttctagttctcgggttcatcgccagcaatccagaccacataatgggacagccggtgacgaggaggagggagagggacgcggaggcggagctggacctgccgccggggttccggttccaccccacagacgacgagctggtggagcactacctgtgccgcaaggcggcggggcagcgcctccccgtgcccatcatcgccgaggtggacctgtacaggttcgacccgtgggacctgccggagcgcgcgctcttcggggcccgggagtggtacttcttcacgcccagggaccgcaagtaccccaacggctcccgccccaaccgcgccgccggcgacgggtactggaaggccaccggcgccgacaagcccgtcgcgccgcgcgccgccgccgccgacgcccgcacgctcgggatcaagaaggcgctcgtcttctacgccggcaaggcgccgcgcggggtcaagacagactggatcatgcacgagtacaggctcgctgacgccggccgccgcgccaagaaggggtcgctcagggtaagtttctacacacaaaaaaaagagagggctgaacgaggaattttttagcttttaattctgtcttggatcgatctgtgtgtgtgcagttggatgactgggtgctgtgccggctgtacaacaagaagaacgagtgggagaagatgcggctggggaagggggcagccgccggcgcagtcaaagaggaggaggccatggacatgagcacctcccactcgcagatcacccactcgtggggcgagacgcgcacgccggagtcggagatcgtggacaacgacctgccgttcccggatccggcgatgatggtgcccaagaaggagcgggtggacgacggcggcagcgccaggaccagcgacctgttcgtggatctcagctacgacgacatccaaggcatgtacagcggcctcgacatgctgccgccggccggcgaggacttgtactcctcgctcttcgcgtcgcccagggtcagggggaaccagcccaccggacccgcggggttgggccccttctgagtgagctcaggcgaggatggaggcatggagatcaggagagaagacggacggcgttgccaactctgtaaatacagcataggacgaggagtcgaacctgactgaacctggtcggggttacaagtcgagtgtgtcggtgtttcgtacatgggaaccgggccttacatgggagccggcccggtcttggtttggcgctggctcattctttagtttcacttcctgcgcagacggtagatgtgtatgcatagctgttcactatcacttcctcttcaacagaaccgattcactccgaatggcaatgtttgaagtgaatccagcgaacggaaaaggttaggttctgtcgtgcgtgcaacgtggtggtagactggtagtcttccaatgcagcaggcatagagacacgtggtaccctaaaagtgcagcaagatagtctaagttcaagctaaaagttaatactttctcagcagaaagtgcagcagaggggatattactgaaccacaaccatgacacacctaaacgaacagatctcctaaaaaatgtttcacatggagctcgtttgactgcactattagactttattctgctattcccattatatatgggttcccattatatatggaatatagtgggttagtaggtggatgaccgtgcgttgcaacggaaacatatcgtcgggatagggaatatggctcctaccaatctggtatcaaaggtctcgacgatcatgagctctgccgctgccccaggcagcagccaccgccagtatcaggcggcccccagcaacgtccagcgcgctagtcgcagctgttgcttcgtcgggagccatgatgcttggccgataatctcccaaatacccagcctccttgtcgggcagcgtcactggaggcatggtggccccgtagccaatggcggccacatgttctaggtggagtacgctcttgagaccgtccgcggcacgaacaccgttgtcctcggcgtcgagaagaagcccacacccaagctcgattaatctaggtagcaaaccctccgctccttctttctatcatccgagcagatctcgtgatcgtgatcctgcccgacgcggacagaggaggtgcggcgacactacgaagcgctggtggatgagaagggggagaattgagctgatctagacgaggaggcctaggacgggctgtcttagcccacacaaaattttagttttttctatataaatgaacattagatataataggttttaaaaattgagtggggcatgatccactttgcctccccttggtcaactactggtttattaagaatagaattatacgatataattatgagagtcctcataacacaa

SEQ ID NO: 1046 - protein, 302 aa, Zea mays
MGQPVTRRRERDAEAELDLPPGFRFHPTDDELVEHYLCRKAAGQRLPVPIIAEVDLYRFDPWDLPERALFGAREWYFFTPRDRKYPNGSRPNRAAGDGYWKATGADKPVAPRAAAADARTLGIKKALVFYAGKAPRGVKTDWIMHEYRLADAGRRAKKGSLRLDDWVLCRLYNKKNEWEKMRLGKGAAAGAVKEEEAMDMSTSHSQITHSWGETRTPESEIVDNDLPFPDPAMMVPKKERVDDGGSARTSDLFVDLSYDDIQGMYSGLDMLPPAGEDLYSSLFASPRVRGNQPTGPAGLGPF

SEQ ID NO: 1047 - DNA, 24 bp, Artificial
  synthetic
gtaagcgcttacgtaagcgcttac

SEQ ID NO: 1048 - DNA, 48 bp, Artificial
  synthetic
gtaagcgcttacgtaagcgcttacgtaagcgcttacgtaagcgcttac

SEQ ID NO: 1049 - RNA, 36 nt, Artificial
  synthetic
uacacguacgauuacaaccaguuuuagagcuaugcu

SEQ ID NO: 1050 - RNA, 36 nt, Artificial; identical to SEQ ID NO: 1049
  synthetic

SEQ ID NO: 1051 - RNA, 36 nt, Artificial; identical to SEQ ID NO: 362
  synthetic

SEQ ID NO: 1052 - RNA, 36 nt, Artificial; identical to SEQ ID NO: 334
  synthetic

SEQ ID NO: 1053 - DNA, 5382 bp, Zea mays
actcgctttctggcgtgcgcctcttgtttgtctgcttccgtcgttccctccccctgtacgcccgtggccgccttttataagcaccagccatctggccttttttttcgacaacgccaaacatctggtttcgctgccccgattcgccacgaagccgcactgtgagagagggacgcggcccgttgtcctcggcttgtacgcaatccttccgtcgctgcgaagctgatccctcgtgttcgccatggcccccagcgtcgccgtggaaaacctcaaccccaaggtgacagcaccgcccgttttcctcgccctgtctacctgtctgtccattgaaggttccgttttgatggattcttcggtgggaagtttgggctttgacgagacagaaagaagcactgtggatgtgctgcgttctgcatatccctgattcatctgagccgcggctttgattctcgtttgcttgagaaatttggggtgaaaagattatccttgattcgctgcagtggtacatgcgtgcttagttcttgttctgatgatccggttttgattcatactttgaaatcaaatgagatttttttaggatatttgtaaaataactgcaccggcgcaaagttccaacagtaagatgttgggaacaagtgtagttccttttaccgggatcactagttgctatcgctctctctcaacccagagttagatctcagtgcgactcgagctgctggagtgccttttctttttgttttgttttgttgtgatcgaatagtttaatgtcatctatgtcagtatcctttttctcccctttgacttcaaaaggggatacggcggtttgtttgaactgctgccccattctggtgcaaaatgatgataggttgatgctgtactatttatgcgagatctgaggtactacaacgttggcaagctgtactttgttactaaacctattgaatgtcgtgtgatcttgatctccacctgtttcatagacaatagctttcgtgctttgcttgtctaggtaaggcgagtgtggcttctcatgcctagctaatacactgacaactattacaggtcttgaaatgtgagtatgcagtccgtggcgagattgtcatccatgctcaggtatcttgactactgatgttcaacaaggcttgcagtctagtacttcagtatgttatatatcactctgttcatgttcccatataatcggttaatcacctcaccacaaggcaataacgttaaatcatataagttttgttaggctgttgtgataatagtacttgttacactgttgtggtaatagtattgcttttgatactcagcttgttcgctgcggcttgctgcggctgcaatccggctgcggctgcggcttctacagtatttttctctctatggattgcagctgcagcagtccaaacagctgcaacagtgtcggcttgtagccagccgaacacgcccactgctatctgatttaactgaatcaacaaagaacagcatagtgcaatacctggagtcacaaacatgtatttgtgttatagagcttactttatagttttggaattctagtttggttcaggaagggaattaagcatatagtctccttgattgccaattaacatattattaatattttaatttgcaattgttccctgatgaaatctatcctaattattgaaggttaataatcttgttcaccatatttaatatggctcactgtgaatattttttagaatcttgagcgctccatgccactagcaggtctgctattattaaggaactgcttcaaaattgatttaatatagccccactgtttttttctgttaacagcgcttgcagcaacaactacaaacacaaccagggtctcttccttttgatgaggtacctaactgttgattcgaaaatttcattgaaagtacttttatctttcatcatttttcgaaaactatatagctcagtccaattatatttttacccttgcagatcctgttctgcaacattgggaatcctcaatcccttggtcagcaacctgtgacgttcttcagggaggtatgcaactttacctgcagattccacctttgtttcttcgatatttacatggtaccttgcaggttcttgctctttgtgatcatccatgcctcttggaaaaagaggaaaccaaatcattgttcaggtgaatatcgtcactgttctattcattcatcattctgtttaccgaagtcttaaatggagagatctagtgcaaacgctcagctaagtgatatcctgctattttcccaacttcagtgtcaaagcaacctaaaaattctaaaaatgttacagagataggacaattatcttcctccaaaatcaaagctgtggcaacataattatgcggaattttctttgaaaatagtaaacatttatataaatagtaaaatttccaatgaaatttgtcaggaatttaacttttccccttcaactctgacagttaaaacatacctcggaagataggtttagagctttaatgtttaactgatctgttcatcagaagaaccattaaatcattgcctaatgcatgcccttctatttttttccctaaaatttcccttgataccatttccagttgaaaagatgatttttaatatttgttttctgtcttatttgcactgtttaatatttttgttagccagaaacttccaaaagtagtttagtgtcccatttatacataaattcttatgtgtacttggtggctcatttcactgcagtgctgatgctatttctcgagcaaagcagattcttgcaactattcctggacgggcaacaggtgcatatagtcacagtcaggtgatcatctcactctgatatatttattgaccacaatgagaaaggaatcttggcttcatttgatttatttatttttcctagggtatcaaaggattgcgtgatgcaattgctgctgggatcacctcacgtgacggattccctgcaaatgcagatgacattttcattacagacggagcaagtcctggggtgtgcattttttacttctctttcagttgtcctggacgttttatgaataaacatgataccactgtagtctcatcatgaccctattcttccttaaggtccacatgatgatgcaattactgattaggaatgagaaagatggcattctgtgcccaattcctcagtaccccttgtactcggcctccatagctcttcatggtggagctcttgtatgtacattcatttgctcagcagaagaatatggtctacagtgatatatattgtatcaccgacacctaaatcgagcacatgttctttcaggtcccctattaccttgatgaaaaaactgggtggggtttggagatctctgatcttaagaaacaactcgaagatgctcggtcaaaaggcattgatgttagggccttggtggttatcaatccaggaaatccgactgggcaggtttatactgatcatttctcctcttgttaaagaacatctctgcttatccacaccatactctttataattgatgtaataacatgagatgtgtatttattgtactcctattttaagtcagtgaatactttgtatacttgtattgtctagggaaaggttttggttgaaaaaaataagtgtttttttgtcgttctgcaatgcgaatgaatgtttttcaatgctggtgaccaaaacacaaattttattgaagtggttcatttatttgtaggttcttgctgaagacaaccaatatgatatagtgaaattctgtaaaaatgagggccttgttcttctagctgatgaggtgagtgagaggctgatagctgatgtcagacgaacaacccaaaaaattgtgccacagctgtaactggaatgccattttcattggtaggtatatcaagagaacatctatgttgacaacaagaaatttaactctttcaagaagattgcaagatccatgggatacggcgaggatgatctccctctagtatcatttcagtctgtctccaaaggtaggtagattgatataaccatctactttatctgccgtttggtcaagtcactgtcttatccaaaagattttgctgctgcaaccaggatactatggagagtgtggtaaaagaggaggttacatggagattactggcttcagtgctccggtaagagagcagatctacaaggtagcttcagtgaacctgtgctccaatatcactggtcaaatccttgcgagcctcgtcatgaatccaccaaaggtctgctattatggcattatgccctgattagaattaggaaacgccaaactgtccagttaaaacccattgcctcattcttcaggttggggacgaatcatatgcttcctacaaggcagagaaagatggaatccttcagtctttagctcgccgtgcaaaggttcgcctggttgcatttctactatagatttgagtaacttcctaaacatattcaaggtcttttttttgttcgttttacaggcactggaagatgcattcaacacgcttgagggattttcatgtaacaaggctgaaggagcaatgtaccttttccctcagatccatctgccacataaggcaattgaggctgctaaagctgccaagaaagcacctgatgcattctatgcgctccgtctccttgaatcaactggaattgttgtggttcctggatctggatttggccaagtgagtcaactcaacctttacatattgtaatgtagttgtttgcctgtagctgccgatgtatatatgggttgaagcatttgatgatttgaaaggagtaataggagacttgcattttgttgatatattttcctgggacatgtagtcaaattgttaactcttattaggtctagtacaggttccctttctattgttaattttctgtgcaacgtatttaagctgcttgtaagggcatgtggtagtgggttcatggagattcatttttcctataaatcaacaacaactatctccctgtatttctatttcatgttaaccgacccaacgctggtctgttcctttgttgcaccaccacaggttcctggaacatggcacgtcagatgcacgatcctgccgcaggaagataaaatccccgcggtgatcacccgcttcaaggctttccatgaggcgttcatggctgagtaccgtgactgaactgttacagtggctgagtaccaccgtgtagaccgaaacaaaataaagctcccccctctctctgtgtctgtgcgtgtgtgtgaactgatctctgaatggacgaacaatgtactctgttggcgcctttaatggcaattgaggaaaattttgatcaaatttctgttgtctgctgttgtgaaagatgcgggattgtttcctagtgcagcgcaaaatgttgtttccatgtactgaggatattggcagggttgcaagagct

SEQ ID NO: 1054 - protein, 482 aa, Zea mays
MAPSVAVENLNPKVLKCEYAVRGEIVIHAQRLQQQLQTQPGSLPFDEILFCNIGNPQSLGQQPVTFFREVLALCDHPCLLEKEETKSLFSADAISRAKQILATIPGRATGAYSHSQGIKGLRDAIAAGITSRDGFPANADDIFITDGASPGVHMMMQLLIRNEKDGILCPIPQYPLYSASIALHGGALVPYYLDEKTGWGLEISDLKKQLEDARSKGIDVRALVVINPGNPTGQVLAEDNQYDIVKFCKNEGLVLLADEVYQENIYVDNKKFNSFKKIARSMGYGEDDLPLVSFQSVSKGYYGECGKRGGYMEITGFSAPVREQIYKVASVNLCSNITGQILASLVMNPPKVGDESYASYKAEKDGILQSLARRAKALEDAFNTLEGFSCNKAEGAMYLFPQIHLPHKAIEAAKAAKKAPDAFYALRLLESTGIVVVPGSGFGQVPGTWHVRCTILPQEDKIPAVITRFKAFHEAFMAEYRD

We claim:

1. A modified Zea sp. cell comprising at least one targeted modification of a first gene and at least one targeted modification of a second gene, wherein the targeted modifications result in a change of expression in the first gene and a change of expression in the second gene, and wherein the changes of expression in the first and second genes are both associated with improvement, relative to a reference cell lacking the modifications, in an agronomically relevant trait selected from the group consisting of: abiotic stress, architecture, biotic stress, photosynthesis, and resource partitioning.

2. The modified Zea sp. cell of claim 1, wherein the first and second genes are both selected:
(a) from the group of genes consisting of the genes identified in Table 23 to be associated with an improved abiotic stress tolerance trait; or
(b) from the group of genes consisting of the genes identified in Table 23 to be associated with an improved architecture trait; or
(c) from the group of genes consisting of the genes identified in Table 23 to be associated with an improved biotic stress tolerance trait; or
(d) from the group of genes consisting of the genes identified in Table 23 to be associated with an improved photosynthesis trait; or
(e) from the group of genes consisting of the genes identified in Table 23 to be associated with an improved resource partitioning trait.

3. The modified Zea sp. cell of claim 1, wherein the first and second genes are selected from:
(a) a gene associated with an improved abiotic stress tolerance trait and that comprises a DNA sequence that is at least 60% identical to the sequence of SEQ ID NO:433, 435, 437, 439, 441, 443, 445, 447, 449, 451, 453, 455, 457, 459, 461, 463, 465, 467, 469, 471, 473, 475, 477, 479, 481, 483, 485, 487, 489, 491, 493, 597, 1007, 1031, 1033, 1035, 1037, 1039, or 1041 or that encodes a protein comprising an amino acid sequence that is at least 95% identical to the amino acid sequence of SEQ ID NO: 434, 436, 438, 440, 442, 444, 446, 448, 450, 452, 454, 456, 458, 460, 462, 464, 466, 468, 470, 472, 474, 476, 478, 480, 482, 484, 486, 488, 490, 492, 494, 598, 1008, 1032, 1034, 1036, 1038, 1040, or 1042; or
(b) a gene associated with an improved architecture trait and that comprises a DNA sequence that is at least 60% identical to the sequence of SEQ ID NO: 497, 499, 501, 503, 505, 507, 509, 511, 513, 515, 517, 519, 521, 523, 525, 527, 529, 531, 533, 535, 537, 539, 541, 543, 545, 547, 549, 551, 553, 555, 557, 559, 561, 563, 565, 567, 569, 571, 573, 575, 577, 579, 581, 583, 585, 587, 589, 591, 593, 595, 597, or 599 or that encodes a protein comprising an amino acid sequence that is at least 95% identical to the amino acid sequence of SEQ ID NO: 498, 500, 502, 503, 506, 508, 510, 512, 514, 516, 518, 520, 522, 524, 526, 528, 530, 532, 534, 536, 538, 540, 542, 544, 546, 548, 550, 552, 554, 556, 558, 560, 562, 566, 568, 572, 574, 576, 578, 580, 582, 584, 586, 588, 590, 592, 594, 596, 598, or 600; or
(c) a gene associated with an improved biotic stress tolerance trait and that comprises a DNA sequence that is at least 60% identical to the sequence of SEQ ID NO: 601, 603, 605, 607, 609, 611, 613, 615, 617, 619, 621, 623, 625, 627, 629, 631, 633, 635, 637, 639, 643, 645, 647, 649, 651, or 653 or that encodes a protein comprising an amino acid sequence that is at least 95% identical to the amino acid sequence of SEQ ID NO: 602, 604, 606, 608, 610, 612, 614, 616, 618, 620, 622, 624, 626, 628, 630, 632, 634, 636, 638, 640, 642, 644, 646, 648, 650, 652, or 654; or
(d) a gene associated with an improved photosynthesis trait and that comprises a DNA sequence that is at least 60% identical to the sequence of SEQ ID NO: 655, 657, 659, 661, 663, or 665 or that encodes a protein comprising an amino acid sequence that is at least 90% identical to the amino acid sequence SEQ ID NO: 656, 658, 660, 662, 664, and 666; or
(e) a gene associated with an improved resource partitioning trait and that comprises a DNA sequence that is at least 60% identical to the sequence of SEQ ID NO: 451, 667, 669, 671, 673, 675, 677, 679, 681, 683, 685, 687, 689, 691, 693, 695, 697, 699, 701, 703, 705, 707, 709, 711, 713, 715, 717, 719, 721, 723, 725, 727, 729, 731, 733, 735, 737, 739, 741, 743, 745, 747, 749, 751, 753, 755, 757, 759, 1024, 1026, 1028, 1043, 1045, or 1053, or that encodes a protein comprising an amino acid sequence that is at least 90% identical to the amino acid sequence of SEQ ID NO: 452, 668, 670, 672, 674, 676, 678, 680, 682, 684, 686, 688, 690, 692, 694, 696, 698, 700, 702, 704, 706, 708, 710, 712, 714, 716, 718, 720, 722, 724, 726, 728, 730, 732, 734, 736, 738, 740, 742, 744, 746, 748, 750, 752, 754, 756, 758, 760, 762, 1025, 1027, 1029, 1044, 1046, or 1054.

4. The modified Zea sp. cell of claim 1, wherein the first and second genes are both genes identified in Table 23 to be associated with resource partitioning, and wherein the changes of expression in the first and second genes are both associated with improvement, relative to a reference cell lacking the modifications, in resource partitioning, wherein the resource partitioning is nitrogen utilization or nitrogen transport.

5. The modified Zea sp. cell of claim 4, wherein the first and second genes are selected from the group consisting of NRT2.2, Gln1.4, Dof1, an SPX domain-containing gene, Gln1.3, Asn synthetase, OsENOD93-1, AspAT, NAD(H)-dependent GOGAT 1, ZmDA1, and ZmDAR1.

6. The modified Zea sp. cell of claim 4, wherein the first and second genes are selected from the group consisting of genes in the nitrate transporter (NRT), transcription factor Dof1, glutamine synthetase (GS), glutamate synthase (GOGAT), and alanine aminotransferase (AlaAT) enzyme families, and wherein the targeted modification results in increased expression of the first and second genes, relative to expression in a reference cell lacking the modifications.

7. The modified Zea sp. cell of claim 6, wherein the first gene is a glutamine synthetase (GS) gene and the second gene is an alanine aminotransferase (AlaAT) gene, and wherein the targeted modification results in increased expression of the first and second genes, relative to expression in a reference cell lacking the modifications.

8. The modified Zea sp. cell of claim 6, wherein the targeted modifications of the first and second genes comprise: (i) an insertion of at least one nitrogen-responsive element sequence upstream of the transcription start site of the first and second genes; or (ii) an insertion of a transcription enhancing polynucleotide comprising the sequence of SEQ ID NO: 1030 upstream of the transcription start site of the first and second genes.

9. The modified Zea sp. cell of claim 1, wherein the targeted modification is of coding sequence or of non-coding sequence.

10. The modified Zea sp. cell of claim 1, wherein the change of expression is increased expression, decreased expression, or expression of a modified coding or non-coding sequence, relative to a reference cell lacking the modifications.

11. The modified Zea sp. cell of claim 1, wherein each targeted modification comprises: (a) deletion of genomic sequence at a double-strand break or between two double-strand breaks effected in coding or non-coding sequence; or (b) insertion of a predetermined sequence encoded by a polynucleotide donor molecule at a double-strand break or between two double-strand breaks effected in coding or non-coding sequence.

12. The modified Zea sp. cell of claim 2, wherein the targeted modification of a first gene from Table 23 and the targeted modification of a second gene from Table 23 both comprise insertion of a predetermined sequence encoded by one or more polynucleotide donor molecules, optionally wherein the predetermined sequence comprises a regulatory sequence from Table 24.

13. The modified Zea sp. cell of claim 12, wherein the targeted modification comprises an insertion of a transcription enhancing polynucleotide comprising the sequence of SEQ ID NO: 1030 upstream of the transcription start site of the first and second genes.

14. The modified Zea sp. cell of claim 10, wherein the change of expression is increased expression and the targeted modifications comprise insertions of a translational enhancer sequence located about 10, 20, 30, or 40 base pairs (bp) to about 100, 240, 300, 400, 500, 1000, 2000, 3000, or 5000 bp of the transcriptional start site of the first gene or second gene.

15. The modified Zea sp. cell of claim 1, wherein the targeted modification is determined relative to a parent Zea sp. cell, and wherein the modified Zea sp. cell is devoid of mitotically or meiotically generated genetic or epigenetic changes relative to the parent Zea sp. cell.

16. A modified Zea sp. plant grown from the modified Zea sp. cell of claim 1, or a progeny plant or progeny seed of the modified plant, wherein cells of the modified plant, progeny plant, or progeny seed comprise the targeted modifications.

17. The modified plant, progeny plant, or progeny seed of claim 16, wherein the first and second genes comprise genes selected from:
(a) the genes identified in Table 23 to be associated with abiotic stress;
(b) the genes identified in Table 23 to be associated with architecture;
(c) the genes identified in Table 23 to be associated with biotic stress;
(d) the genes identified in Table 23 to be associated with photosynthesis; or
(e) the genes identified in Table 23 to be associated with resource partitioning.

18. The modified plant, progeny plant, or progeny seed of claim 16, wherein each of the first and second genes comprises:
(a) a gene associated with an improved abiotic stress tolerance trait and that comprises a DNA sequence that is at least 60% identical to the sequence of SEQ ID NO:433, 435, 437, 439, 441, 443, 445, 447, 449, 451, 453, 455, 457, 459, 461, 463, 465, 467, 469, 471, 473, 475, 477, 479, 481, 483, 485, 487, 489, 491, 493, 597, 1007, 1031, 1033, 1035, 1037, 1039, or 1041 or that encodes a protein comprising an amino acid sequence that is at least 95% identical to the amino acid sequence of SEQ ID NO: 434, 436, 438, 440, 442, 444, 446, 448, 450, 452, 454, 456, 458, 460, 462, 464, 466, 468, 470, 472, 474, 476, 478, 480, 482, 484, 486, 488, 490, 492, 494, 598, 1008, 1032, 1034, 1036, 1038, 1040, or 1042; or
(b) a gene associated with an improved architecture trait and that comprises a DNA sequence that is at least 60% identical to the sequence of SEQ ID NO: 497, 499, 501, 503, 505, 507, 509, 511, 513, 515, 517, 519, 521, 523, 525, 527, 529, 531, 533, 535, 537, 539, 541, 543, 545, 547, 549, 551, 553, 555, 557, 559, 561, 563, 565, 567, 569, 571, 573, 575, 577, 579, 581, 583, 585, 587, 589, 591, 593, 595, 597, or 599 or that encodes a protein comprising an amino acid sequence that is at least 95% identical to the amino acid sequence of SEQ ID NO: 498, 500, 502, 503, 506, 508, 510, 512, 514, 516, 518, 520, 522, 524, 526, 528, 530, 532, 534, 536, 538, 540, 542, 544, 546, 548, 550, 552, 554, 556, 558, 560, 562, 566, 568, 572, 574, 576, 578, 580, 582, 584, 586, 588, 590, 592, 594, 596, 598, or 600; or
(c) a gene associated with an improved biotic stress tolerance trait and that comprises a DNA sequence that is at least 60% identical to the sequence of SEQ ID NO: 601, 603, 605, 607, 609, 611, 613, 615, 617, 619, 621, 623, 625, 627, 629, 631, 633, 635, 637, 639, 643, 645, 647, 649, 651, or 653 or that encodes a protein comprising an amino acid sequence that is at least 95% identical to the amino acid sequence of SEQ ID NO: 602, 604, 606, 608, 610, 612, 614, 616, 618, 620, 622, 624, 626, 628, 630, 632, 634, 636, 638, 640, 642, 644, 646, 648, 650, 652, or 654; or
(d) a gene associated with an improved photosynthesis trait and that comprises a DNA sequence that is at least 60% identical to the sequence of SEQ ID NO: 655, 657, 659, 661, 663, or 665 or that encodes a protein comprising an amino acid sequence that is at least 90% identical to the amino acid sequence SEQ ID NO: 656, 658, 660, 662, 664, and 666; or
(e) a gene associated with an improved resource partitioning trait and that comprises a DNA sequence that is at least 60% identical to the sequence of SEQ ID NO: 451, 667, 669, 671, 673, 675, 677, 679, 681, 683, 685, 687, 689, 691, 693, 695, 697, 699, 701, 703, 705, 707, 709, 711, 713, 715, 717, 719, 721, 723, 725, 727, 729, 731, 733, 735, 737, 739, 741, 743, 745, 747, 749, 751, 753, 755, 757, 759, 1024, 1026, 1028, 1043, 1045, or 1053, or that encodes a protein comprising an amino acid sequence that is at least 90% identical to the amino acid sequence of SEQ ID NO: 452, 668, 670, 672, 674, 676, 678, 680, 682, 684, 686, 688, 690, 692, 694, 696, 698, 700, 702, 704, 706, 708, 710, 712, 714, 716, 718, 720, 722, 724, 726, 728, 730, 732, 734, 736, 738, 740, 742, 744, 746, 748, 750, 752, 754, 756, 758, 760, 762, 1025, 1027, 1029, 1044, 1046, or 1054.

19. The modified plant, progeny plant, or progeny seed of claim 16, wherein the first and second genes are both genes identified in Table 23 to be associated with resource partitioning, and wherein the changes of expression in the first and second genes are both associated with improvement, relative to a reference cell lacking the modifications, in resource partitioning, wherein the resource partitioning is nitrogen utilization or nitrogen transport.

20. The modified plant, progeny plant, or progeny seed of claim 19, wherein the first and second genes are selected from the group consisting of NRT2.2, Gln1.4, Dof1, an SPX domain-containing gene, Gln1.3, Asn synthetase, OsENOD93-1, AspAT, NAD(H)-dependent GOGAT 1, ZmDA1, and ZmDAR1.

21. The modified plant, progeny plant, or progeny seed of claim 19, wherein the first and second genes are selected from the group consisting of genes in the nitrate transporter (NRT), transcription factor Dof1, glutamine synthetase (GS), glutamate synthase (GOGAT), and alanine aminotransferase (AlaAT) enzyme families, and wherein the targeted modification results in increased expression of the first and second genes.

22. The modified plant, progeny plant, or progeny seed of claim 20 or 21, wherein the targeted modifications of the first and second genes comprise: (i) insertion of at least one nitrogen-responsive element sequence upstream of the transcription start site of the first and second genes; or (ii) an insertion of a transcription enhancing polynucleotide comprising the sequence of SEQ ID NO: 1030 upstream of the transcription start site of the first and second genes.

23. A modified Zea sp. plant comprising a targeted modification in a first gene and a targeted modification in a second gene, wherein the first gene comprises a first DNA sequence that is at least 60%, 70%, 80%, 90%, 95%, 96%, 97%, 98% or 99% identical to SEQ ID NO: 597, 1007, 1031, 1033, 1035, 1037, 1039, or 1041, wherein the second gene comprises a second DNA sequence that is distinct from the first DNA sequence and at least 60%, 70%, 80%, 90%, 95%, 96%, 97%, 98% or 99% identical to SEQ ID NO: 433, 435, 437, 439, 441, 443, 445, 447, 449, 451, 453, 455, 457, 459, 461, 463, 465, 467, 469, 471, 473, 475, 477, 479, 481, 483, 485, 487, 489, 491, 493, 597, 1007, 1031, 1033, 1035, 1037, 1039, or 1041, wherein the targeted modifications result in an increase in expression of the first and second gene relative to a reference plant lacking the modifications, and wherein the increase of expression in the first and second gene are associated with an improvement in one or more abiotic stress tolerance traits relative to the first reference plant lacking the modifications.

24. The Zea sp. plant of claim 23, wherein
(a) the first gene encodes a protein comprising an amino acid sequence that is at least 95%, 96%, 97%, 98% or 99% identical to the amino acid sequence of SEQ ID NO: 598, 1008, 1032, 1034, 1036, 1038, 1040, or 1042; and/or
(b) the second gene encodes a protein comprising an amino acid sequence that is at least 95%, 96%, 97%, 98% or 99% identical to the amino acid sequence of SEQ ID NO: 434, 436, 438, 440, 442, 444, 446, 448, 450, 452, 454, 456, 458, 460, 462, 464, 466, 468, 470, 472, 474, 476, 478, 480, 482, 484, 486, 488, 490, 492, 494, 598, 1008, 1032, 1034, 1036, 1038, 1040, or 1042.

25. The Zea sp. plant of claim 23, wherein the improvement in an abiotic stress tolerance trait is an improvement in water use efficiency, and wherein the second gene comprises a DNA sequence that is at least 60%, 70%, 80%, 90%, 95%, 96%, 97%, 98% or 99% identical to SEQ ID NOs: 439, 441, 443, 445, 447, 449, 451, 453, 455, 457, 459, 461, 463, 465, 467, 469, 471, 473, 475, 477, 597, 1007, 1031, 1033, 1035, 1037, 1039, or 1041.

26. The Zea sp. plant of claim 23, wherein the improvement in an abiotic stress tolerance trait is an improvement in water use efficiency and wherein:
(a) the first gene encodes a protein comprising an amino acid sequence that is at least 95%, 96%, 97%, 98% or 99% identical to the amino acid sequence of SEQ ID NO: 598, 1008, 1032, 1034, 1036, 1038, 1040, or 1042; and/or
(b) the second gene encodes a protein comprising an amino acid sequence that is at least 95%, 96%, 97%, 98% or 99% identical to the amino acid sequence of SEQ ID NO: 440, 442, 444, 446, 448, 450, 452, 454, 456, 458, 460, 462, 464, 466, 468, 470, 472, 474, 476, 478, 598, 1008, 1032, 1034, 1036, 1038, 1040, or 1042.

27. A modified Zea sp. plant comprising a targeted modification in a first gene and a targeted modification in a second gene, wherein the first gene comprises a first DNA sequence that is at least 60%, 70%, 80%, 90%, 95%, 96%, 97%, 98% or 99% identical to SEQ ID NO: 451, 1043, or 1045, wherein the second gene comprises a second DNA sequence that is distinct from the first DNA sequence and that is at least 60%, 70%, 80%, 90%, 95%, 96%, 97%, 98% or 99% identical to SEQ ID NO: 451, 683, 685, 687, 689, 691, 693, 695, 1024, 1026, 1028, 1043, or 1045, wherein the targeted modifications result in an increase in expression of the first and second gene relative to a reference Zea sp. plant lacking the modifications, and wherein the increase of expression in the first and second gene are associated with an improvement in nitrogen use efficiency relative to the first reference plant lacking the modification.

28. The modified Zea sp. plant of claim 27, wherein
(a) the first gene encodes a protein comprising an amino acid sequence that is at least 95%, 96%, 97%, 98%, or 99% identical to the amino acid sequence of SEQ ID NO: 452, 1044, or 1046; and/or
(b) the second gene encodes a protein comprising an amino acid sequence that is at least 95%, 96%, 97%, 98%, or 99% identical to the amino acid sequence of SEQ ID NO: 452, 684, 686, 688, 690, 692, 694, 696, 1025, 1027, 1029, 1044, or 1046.

29. A modified Zea sp. plant part obtained from the plant of claim 23 or 27, wherein the plant part comprises the modifications.

30. The modified plant part of claim 29, wherein the plant part is a seed.

31. A method of Zea sp. plant seed production, said method comprising crossing the modified Zea sp. plant of claim 16, 23, or 27 with a second Zea sp. plant to produce Zea sp. plant seed.

32. The method of claim 31, further comprising the step of harvesting the seed.

33. The method of claim 31, wherein the Zea sp. plant or the second Zea sp. plant further comprise a transgene conferring a desired trait and the harvested seed comprise the transgene.

34. A method of Zea sp. plant seed production, said method comprising selfing the plant of claim 16 or 23 to produce Zea sp. plant seed and optionally harvesting the seed.

35. The method of claim 34, wherein the Zea sp. plant and the seed are inbred.

36. A method of producing a Zea sp. plant comprising an added desired trait, said method comprising introducing a transgene conferring the desired trait into the plant of claim 16 or 23.

37. A processed product or commodity product obtained from the modified plant, progeny plant, or seed of claim 16, 23, 27, or 30.

38. A method of producing a treated Zea sp. seed comprising contacting the seed of claim 16 with a composition comprising a biological agent, insecticide, and/or fungicide.

39. A method of producing Zea sp. plant material comprising growing the Zea sp. plant of claim 16, 23, or 27.

40. The method of claim 39, wherein growing comprises at least one of sowing a seed which germinates and forms the plant, irrigating the seed or plant, and/or treating the plant or the seed with a biological agent, herbicide, insecticide, or fungicide.

41. The method of claim 39, wherein the method further comprises harvesting the seed from the plant.

42. A method of effecting in a Zea sp. genome at least one targeted modification of a first gene and at least one targeted modification of a second gene, wherein the targeted modifications result in a change of expression in the first gene and a change of expression in the second gene, wherein:
(i) the first and second genes are both selected:
(a) from the group of genes consisting of the genes identified in Table 23 to be associated with an improved abiotic stress tolerance trait; or
(b) from the group of genes consisting of the genes identified in Table 23 to be associated with an improved architecture trait; or
(c) from the group of genes consisting of the genes identified in Table 23 to be associated with an improved biotic stress tolerance trait; or
(d) from the group of genes consisting of the genes identified in Table 23 to be associated with an improved photosynthesis trait; or
(e) from the group of genes consisting of the genes identified in Table 23 to be associated with an improved resource partitioning trait; and
(ii) each targeted modification is achieved by integrating a predetermined sequence encoded by a polynucleotide donor molecule at a double-strand break (DSB) located upstream of, downstream of, or within the first or the second gene, and wherein the polynucleotide donor molecule is selected from the group consisting of a double-stranded DNA, a single-stranded DNA, a single-stranded DNA/RNA hybrid, and a double-stranded DNA/RNA hybrid.

43. The method of claim 42, wherein the first and second genes are selected from:
(a) a gene associated with an improved abiotic stress tolerance trait and that comprises a DNA sequence that is at least 60% identical to the sequence of SEQ ID NO:433, 435, 437, 439, 441, 443, 445, 447, 449, 451, 453, 455, 457, 459, 461, 463, 465, 467, 469, 471, 473, 475, 477, 479, 481, 483, 485, 487, 489, 491, 493, 597, 1007, 1031, 1033, 1035, 1037, 1039, or 1041 or that encodes a protein comprising an amino acid sequence that is at least 95% identical to the amino acid sequence of SEQ ID NO: 434, 436, 438, 440, 442, 444, 446, 448, 450, 452, 454, 456, 458, 460, 462, 464, 466, 468, 470, 472, 474, 476, 478, 480, 482, 484, 486, 488, 490, 492, 494, 598, 1008, 1032, 1034, 1036, 1038, 1040, or 1042; or
(b) a gene associated with an improved architecture trait and that comprises a DNA sequence that is at least 60% identical to the sequence of SEQ ID NO: 497, 499, 501, 503, 505, 507, 509, 511, 513, 515, 517, 519, 521, 523, 525, 527, 529, 531, 533, 535, 537, 539, 541, 543, 545, 547, 549, 551, 553, 555, 557, 559, 561, 563, 565, 567, 569, 571, 573, 575, 577, 579, 581, 583, 585, 587, 589, 591, 593, 595, 597, or 599 or that encodes a protein comprising an amino acid sequence that is at least 95% identical to the amino acid sequence of SEQ ID NO: 498, 500, 502, 503, 506, 508, 510, 512, 514, 516, 518, 520, 522, 524, 526, 528, 530, 532, 534, 536, 538, 540, 542, 544, 546, 548, 550, 552, 554, 556, 558, 560, 562, 566, 568, 572, 574, 576, 578, 580, 582, 584, 586, 588, 590, 592, 594, 596, 598, or 600; or
(c) a gene associated with an improved biotic stress tolerance trait and that comprises a DNA sequence that is at least 60% identical to the sequence of SEQ ID NO: 601, 603, 605, 607, 609, 611, 613, 615, 617, 619, 621, 623, 625, 627, 629, 631, 633, 635, 637, 639, 643, 645, 647, 649, 651, or 653 or that encodes a protein comprising an amino acid sequence that is at least 95% identical to the amino acid sequence of SEQ ID NO: 602, 604, 606, 608, 610, 612, 614, 616, 618, 620, 622, 624, 626, 628, 630, 632, 634, 636, 638, 640, 642, 644, 646, 648, 650, 652, or 654; or
(d) a gene associated with an improved photosynthesis trait and that comprises a DNA sequence that is at least 60% identical to the sequence of SEQ ID NO: 655, 657, 659, 661, 663, or 665 or that encodes a protein comprising an amino acid sequence that is at least 90% identical to the amino acid sequence SEQ ID NO: 656, 658, 660, 662, 664, and 666; or
(e) a gene associated with an improved resource partitioning trait and that comprises a DNA sequence that is at least 60% identical to the sequence of SEQ ID NO: 451, 667, 669, 671, 673, 675, 677, 679, 681, 683, 685, 687, 689, 691, 693, 695, 697, 699, 701, 703, 705, 707, 709, 711, 713, 715, 717, 719, 721, 723, 725, 727, 729, 731, 733, 735, 737, 739, 741, 743, 745, 747, 749, 751, 753, 755, 757, 759, 1024, 1026, 1028, 1043, or 1045, or 1053, or that encodes a protein comprising an amino acid sequence that is at least 90% identical to the amino acid sequence of SEQ ID NO: 452, 668, 670, 672, 674, 676, 678, 680, 682, 684, 686, 688, 690, 692, 694, 696, 698, 700, 702, 704, 706, 708, 710, 712, 714, 716, 718, 720, 722, 724, 726, 728, 730, 732, 734, 736, 738, 740, 742, 744, 746, 748, 750, 752, 754, 756, 758, 760, 762, 1025, 1027, 1029, 1044, 1046, or 1054.

44. The method of claim 42, wherein the first and the second gene are associated with an improvement in water use efficiency, wherein the first gene comprises a DNA sequence that is at least 60%, 70%, 80%, 90%, 95%, 96%, 97%, 98%, or 99% identical to 1031, 1033, 1035, 1037, 1039, or 1041 and the second gene comprises a DNA sequence that is at least 60% identical to SEQ ID NO: 439, 441, 443, 445, 447, 449, 451, 453, 455, 457, 459, 461, 463, 465, 467, 469, 471, 473, 475, 477, 597, or 1007.

45. The method of claim 42, wherein the first and the second gene are associated with an improvement in nitrogen use efficiency, wherein the first gene comprises a DNA sequence that is at least 60%, 70%, 80%, 90%, 95%, 96%, 97%, 98%, or 99% identical to SEQ ID NO: 1043 or 1045 and the second gene comprises a DNA sequence that is at least 60%, 70%, 80%, 90%, 95%, 96%, 97%, 98%, or 99% identical to SEQ ID NO: 451, 683, 685, 687, 689, 691, 693, 695, 1024, 1026, or 1028.

46. The method of claim 42, wherein the first gene comprises a first DNA sequence that is at least 60%, 70%, 80%, 90%, 95%, 96%, 97%, 98% or 99% identical to SEQ ID NO: 597, 1007, 1031, 1033, 1035, 1037, 1039, or 1041, wherein the second gene comprises a second DNA sequence that is distinct from the first DNA sequence and at least 60%, 70%, 80%, 90%, 95%, 96%, 97%, 98% or 99% identical to SEQ ID NO: 433, 435, 437, 439, 441, 443, 445, 447, 449, 451, 453, 455, 457, 459, 461, 463, 465, 467, 469, 471, 473, 475, 477, 479, 481, 483, 485, 487, 489, 491, 493, 597, 1007, 1031, 1033, 1035, 1037, 1039, or 1041, wherein the targeted modifications result in an increase in expression of the first and second gene relative to a reference plant lacking the modifications, and wherein the increase of expression in the first and second gene are associated with an improvement in one or more abiotic stress tolerance traits relative to the first reference plant lacking the modifications.

47. The method of claim 42, wherein the first gene comprises a first DNA sequence that is at least 60%, 70%, 80%, 90%, 95%, 96%, 97%, 98% or 99% identical to SEQ ID NO: 451, 1043, or 1045, wherein the second gene comprises a second DNA sequence that is distinct from the first DNA sequence and that is at least 60%, 70%, 80%, 90%, 95%, 96%, 97%, 98% or 99% identical to SEQ ID NO: 451, 683, 685, 687, 689, 691, 693, 695, 1024, 1026, 1028, 1043, or 1045, wherein the targeted modifications result in an increase in expression of the first and second gene relative to a reference Zea sp. plant lacking the modifications, and wherein the increase of expression in the first and second gene are associated with an improvement in nitrogen use efficiency relative to the first reference plant lacking the modification.

48. The method of claim 42, wherein the DSB is introduced into the Zea sp. genome by at least one of the group consisting of:
(a) a nuclease selected from the group consisting of an RNA-guided nuclease, an RNA-guided DNA endonuclease, a type II Cas nuclease, a Cas9, a type V Cas nuclease, a Cpf1 (Cas12a) nuclease, a CasY (Cas12d) nuclease, a CasX (Cas12e) nuclease, a C2c1 nuclease, a C2c3 nuclease, a Cas12f nuclease, a Cas12i nuclease, a Cas12j nuclease, an engineered nuclease, a codon-optimized nuclease, a zinc-finger nuclease (ZFN), a transcription activator-like effector nuclease (TAL-effector nuclease), an Argonaute, and a meganuclease or engineered meganuclease;
(b) a polynucleotide encoding one or more nucleases capable of effecting site-specific alteration of a target nucleotide sequence; and
(c) a guide RNA (gRNA) for an RNA-guided nuclease, or a DNA encoding a gRNA for an RNA-guided nuclease.

49. The method of claim 42, wherein the DSB is introduced into the Zea sp. genome by at least one treatment selected from the group consisting of:
(a) bacterially mediated (e. g., Agrobacterium sp., Rhizobium sp., Sinorhizobium sp., Mesorhizobium sp., Bradyrhizobium sp., Azobacter sp., Phyllobacterium sp.) transfection;
(b) Biolistics or particle bombardment;
(c) treatment with at least one chemical, enzymatic, or physical agent; and
(d) application of heat or cold, ultrasonication, centrifugation, positive or negative pressure, cell wall or membrane disruption or deformation, or electroporation.

50. The method of claim 42, wherein the change of expression in the first gene and the change of expression in the second gene are both associated with improvement, relative to a reference Zea sp. genome lacking the targeted modifications, in an agronomically relevant trait selected from the group consisting of: abiotic stress, architecture, biotic stress, photosynthesis, and resource partitioning.

51. The method of claim 42, wherein the sequence encoded by the polynucleotide donor molecule that is integrated into the double-strand break (DSB) located upstream of, downstream of, or within the first gene, is (a) identical to or (b) different from the sequence encoded by the polynucleotide donor molecule that is integrated into the double-strand break (DSB) located upstream of, downstream of, or within the second gene.
